(19) United States
(12) Patent Application Publication
(10) Pub. No.: US 2023/0322953 A1
(43) Pub. Date: Oct. 12, 2023

(54) BINDING PROTEIN HAVING H2L2 AND HCAB STRUCTURES

(71) Applicant: HARBOUR BIOMED (SHANGHAI) CO., LTD, Shanghai (CN)

(72) Inventors: Yun HE, Shanghai (CN); Lei SHI, Shanghai (CN); Haishan LUO, Shanghai (CN); Qiang LV, Shanghai (CN); Jinqiu HE, Shanghai (CN); Zenglin PEI, Shanghai (CN); Yongqiang WANG, Shanghai (CN); Chen ZHONG, Shanghai (CN); Bing HUANG, Shanghai (CN); Jianxun ZHAO, Shanghai (CN); Xingxing JIA, Shanghai (CN); Xuekun ZHANG, Shanghai (CN); Chuchu ZHAO, Shanghai (CN); Fei CHEN, Shanghai (CN); Lei NIU, Shanghai (CN)

(73) Assignee: HARBOUR BIOMED (SHANGHAI) CO., LTD, Shanghai (CN)

(21) Appl. No.: 18/002,655

(22) PCT Filed: Jun. 29, 2021
(86) PCT No.: PCT/CN2021/103044

§ 371 Date: Dec. 20, 2022

(30) Foreign Application Priority Data
Jun. 30, 2020 (CN) 202010618158.0

(51) Int. Cl. C07K 16/46; C12N 15/63; A61P 35/00

(52) U.S. Cl. CPC C07K 16/468; C12N 15/63; A61P 35/00; C07K 2317/565; C07K 2317/52; C07K 2317/31

(57) ABSTRACT

Disclosed is a binding protein having at least two protein functional regions, the binding protein comprising a protein functional region A and a protein functional region B; the protein functional region A and the protein functional region B target different antigens or epitopes, the protein functional region A is a Fab or a scFv structure, the protein functional region B is a VH structure, and there are one or more of each of the protein functional region A and the protein functional region B. A multi-specific binding protein has a smaller molecular weight, fewer polypeptide chains, and a simpler structure. By means of different structure types, relative positions, binding valence and other parameters, the functional activities for different targets can be adjusted, and then different combinations of activities can be designed so as to meet the needs of different dose combinations of clinical combinations.

### TECHNICAL FIELD

[0001] The present invention relates to the field of biomedicine, in particular to a bispecific or multispecific binding protein with H2L2 and HCAb structures and use thereof.

### BACKGROUND

[0002] Antibodies of most species are of tetrameric structures comprising two identical heavy chains and two identical light chains, which are also referred to as “H2L2”. A heavy-chain antibody (HCAb) lacking light chains is naturally present in the serum of Camelidae species and sharks. The variable region of the heavy-chain antibody (VHH) fragment is similar to the Fab of the H2L2 antibody, with a stable structure and specific antigen-binding activity, but has a molecular weight of only about 13 kDa, and is therefore also referred to as a nanobody or a single-domain antibody. Human antibody has a natural structure of “H2L2”, so it is impossible to obtain useful human heavy-chain antibodies from natural sources. However, Frank Grosveld et al. proposed a method for obtaining a fully human heavy-chain antibody using a transgenic animal (WO2007/096779), and a stable and soluble fully human VH single-domain antibody can be obtained by this method.

[0003] Bispecific antibodies and multispecific antibodies are a class of artificial antibodies prepared by the protein engineering technology on the basis of natural monoclonal antibodies, which can bind to two or more different antigens or different epitopes on the same antigen, and can achieve mechanism of action and functional effects that cannot be achieved by some monospecific antibodies.

[0004] The structural design of the bispecific antibodies is very important. The most significant challenge in generating bispecific antibodies from two different H2L2 antibodies is how to obtain functional bispecific antibody molecules with the correct chain combinations from more than 10 different combinations of heavy and light chains, that is, how to solve the problem of mismatching of chains. Scientists have developed a number of strategies to try to solve this problem: for example, fusing VH and VL together using the structure of a single-chain variable fragment (scFv); alternatively, promoting the heterodimerization of heavy chains using the knob-into-hole (KiH) technique or other mutants with complementary spatial structures; alternatively, reducing the number of different polypeptide chains using the “consensus light chain” or “consensus heavy chain” technique, and so on. However, various technical approaches have their limitations, for example, scFv structures are often unstable and prone to aggregation; the “consensus light chain” technique requires the use of a very complex screening process to obtain VLs that can be paired with different VHs; and FIT-Ig and other techniques will produce bispecific antibody molecules with relatively large size (about 250 kDa), which may affect the ability of the bispecific antibody molecules to penetrate cells or tissues. Therefore, there is still an urgent need to develop new structures of bispecific antibodies and techniques for preparing bispecific antibodies.

[0005] Heavy-chain antibodies and single-domain antibodies derived therefrom have unique advantages in the construction of bispecific or even multispecific antibodies. The heavy-chain antibody has an antigen-binding domain that is only one quarter the size of the Fab of a conventional antibody, and does not have light chain, so that the problem of mismatching of light chains is avoided. Therefore, bispecific or even multispecific antibodies with smaller molecular weight, less polypeptide chains and simpler structures can be constructed using heavy-chain antibodies and single-domain antibodies derived therefrom. However, the potential immunogenic risk of a non-human heavy-chain antibody may limit its therapeutic use. Therefore, compared with the nanobody of Camelidae species, the construction of bispecific or multispecific antibodies using the fully human heavy-chain antibody has more advantages in immunogenicity and druggability.

### SUMMARY

[0006] In order to overcome the defects in the prior art of the lack of bispecific or multispecific binding proteins with good therapeutic effect, stability and convenient production, the present invention provides a bispecific or multispecific binding protein with H2L2 and HCAb structures and a method for preparing and using the binding protein, which utilizes multivalent and multispecific binding proteins constructed by fully human heavy-chain antibodies and single-domain antibodies derived therefrom. Compared with the multivalent and multispecific binding proteins constructed using conventional IgG antibodies, such binding protein has many advantages and is more flexible in terms of adjusting specificity and binding valence. The multivalent and multispecific binding proteins provided herein comprise at least one heavy chain variable domain VH derived from a human heavy-chain antibody, and are capable of binding to two or more antigens, two or more epitopes on the same antigen or two or more copies on the same epitope.

[0007] In order to solve the above technical problems, a first technical solution of the present invention is as follows: provided is a binding protein comprising at least two protein functional regions, wherein the binding protein comprises a protein functional region A and a protein functional region B, wherein the protein functional region A and the protein functional region B target different antigens or antigenic epitopes, the protein functional region A is of a Fab or scFv structure, the protein functional region B is of a VH structure, and the number of each of the protein functional region A and the protein functional region B is one or more. Preferably, the binding protein further comprises Fc, wherein the number of the Fc is two, thereby forming an Fc dimer. Preferably, the binding protein is of a symmetric or asymmetric structure, and/or the Fc dimer is as a homodimer or a heterodimer.

[0008] In some specific embodiments, (I) the binding protein is of a symmetric structure, and the symmetric structure is a left-right symmetric IgG-like structure, wherein the number of the protein functional region A is two, and the number of the protein functional region B is two or four. The two protein functional regions A form an IgG structure with the two Fc. In the left-right symmetric IgG-like structure, the left and right are only spatially relative positions, and the structure may be up-down symmetric or front-back symmetric. The left-right symmetric IgG-like structure means that extra protein functional regions are left-right symmetrically linked to the antibody of the IgG structure, and these extra protein functional regions can be linked to the C-terminus of CH3 of an Fc functional region or the N-terminus of a VH or VL, or linked in an embedded form between the variable region and the Fc functional region of the IgG structure. As used herein, “extra” refers to structures or functional regions other than the IgG structure.

[0009] Preferably, when the number of the protein functional region B is two, the binding protein is a tetravalent binding protein specifically comprising a structure described as follows: (a) a protein functional region A, a protein functional region B and Fc are arranged sequentially from the N-terminus to the C-terminus of the binding protein, wherein the protein functional region A is linked to the protein functional region B via a first linker peptide (L1), and the protein functional region B is linked to the Fc via a second linker peptide (L2); in this embodiment, the two protein functional regions B form a symmetric dimer of a single chain antibody with the Fc, and the protein functional region A is linked to the N-terminus of the dimer of the single chain antibody, in which case the protein functional region A may be linked to the N-terminus of the protein functional region B via its CH1 (FIG. 1 (2)) or CL (FIG. 1 (1)); or, (b) a protein functional region B, a protein functional region A and Fc are arranged sequentially from the N-terminus to the C-terminus of the binding protein, wherein the protein functional region B is linked to the protein functional region A via a linker peptide, and the protein functional region A is linked to the Fc via a hinge region; in this embodiment, the two protein functional regions A form a symmetric IgG structure with the Fc, and the protein functional region B is linked to the N-terminus of the IgG structure, in which case the protein functional region B may be linked to the N-terminus of VH (FIG. 1 (3)) or VL (FIG. 1 (4)) of the protein functional region A; or, (c) a protein functional region A, Fc and a protein functional region B are arranged sequentially from the N-terminus to the C-terminus of the binding protein, wherein the protein functional region A is linked to the Fc via a hinge region, and the Fc is linked to the protein functional region B via a linker peptide; in this embodiment, the two protein functional regions A form a symmetric IgG structure with the Fc, and the protein functional region B is linked to the C-terminus of the IgG structure, in which case the protein functional region B may be linked to the C-terminus of CH3 of the Fc (FIG. 1 (5)) or CL (FIG. 1 (6)) of the protein functional region A;

[0010] Preferably, when the number of the protein functional region B is four, the binding protein is a hexavalent binding protein specifically comprising a structure described as follows: two additional protein functional regions B are further linked to the N-terminus or the C-terminus of the binding protein described in the (a), (b) or (c); preferably linked to the C-terminus of the Fc or the C-terminus of the original protein functional region B of the binding protein described in the (c), or linked to the N-terminus of the protein functional region A together with the original protein functional region B of the binding protein described in the (b). The “additional” described herein is merely for convenience, to distinguish from the above protein functional region B, i.e., the “original” protein functional region, and there is no precedence distinction between the additional protein functional region and the original protein functional region in the actual design or production of the antibody. In this embodiment, the two protein functional regions A form a symmetric IgG structure with the Fc, and the protein functional region B is linked to the C-terminus of the IgG structure, in which case two of the protein functional regions B may be linked to the CH3s of the Fc via first linker peptides, and the other two of the protein functional regions B are linked to the above two protein functional regions B via second linker peptides (FIG. 1 (7)); or two of the protein functional regions B may be linked to the N-termini of the VHs of the protein functional regions A via first linker peptides, and the other two of the protein functional regions B may be linked to the N-termini of the VLs of the protein functional regions A via second linker peptides (FIG. 1 (9)).

[0011] The above binding protein with two different protein functional regions is also referred to as a bispecific binding protein. More preferably, the binding protein further comprises a protein functional region C, and the binding protein is a hexavalent or octavalent trispecific binding protein specifically comprises a structure described as follows: the protein functional region C targets different antigens or antigenic epitopes with the protein functional region A and the protein functional region B, and the protein functional region C is linked to the N-terminus or the C-terminus of the antibody; preferably, the number of the protein functional region C is two, and the protein functional region C is linked to the C-terminus of the binding protein described in the (c), or linked to the N-terminus of the protein functional region A as the protein functional region B of the binding protein described in the (b). In this embodiment, the two protein functional regions C are further linked to the C-termini of structure (5) (FIG. 1 (8)) or the N-termini of structure (3) or (4) via second linker peptides (FIG. 1 (10) shows the case of linking to the N-termini of structure (3)).

[0012] Even more preferably, the binding protein has four polypeptide chains, including two identical short chains (or referred to as “polypeptide chains 1”) and two identical long chains (or referred to as “polypeptide chains 2”), wherein (1) the short chain comprises VH_A-CH1 sequentially from the N-terminus to the C-terminus, and the long chain comprises VL_A-CL-L1-VH_B-L2-CH2-CH3 sequentially from the N-terminus to the C-terminus; or (2) the short chain comprises VL_A-CL sequentially from the N-terminus to the C-terminus, and the long chain comprises VH_A-CH1-L1-VH_B-L2-CH2-CH3 sequentially from the N-terminus to the C-terminus; or (3) the short chain comprises VL_A-CL sequentially from the N-terminus to the C-terminus, and the long chain comprises VH_B-L-VH_A-CH1-h-CH2-CH3 sequentially from the N-terminus to the C-terminus; or (4) the short chain comprises VH_B-L-VL_A-CL sequentially from the N-terminus to the C-terminus, and the long chain comprises VH_A-CH1-h-CH2-CH3 sequentially from the N-terminus to the C-terminus; or (5) the short chain comprises VL_A-CL sequentially from the N-terminus to the C-terminus, and the long chain comprises VH_A-CH1-h-CH2-CH3-L-VH_B sequentially from the N-terminus to the C-terminus; or (6) the short chain comprises VL_A-CL-L-VH_B sequentially from the N-terminus to the C-terminus, and the long chain comprises VH_A-CH1-h-CH2-CH3 sequentially from the N-terminus to the C-terminus; or (7) the short chain comprises VL_A-CL sequentially from the N-terminus to the C-terminus, and the long chain comprises VH_A-CH1-h-CH2-CH3-L1-VH_B-L2-VH_B sequentially from the N-terminus to the C-terminus; or (8) the short chain comprises VL_A-CL sequentially from the N-terminus to the C-terminus, and the long chain comprises VH_A-CH1-h-CH2-CH3-L1-VH_B-L2-VH_C sequentially from the N-terminus to the C-terminus; or (9) the short chain comprises VH_B-L1-VL_A-CL sequentially from the N-terminus to the C-terminus, and the long chain comprises VH_B-L2-VH_A-CH1-h-CH2-CH3 sequentially from the N-terminus to the C-terminus; or (10) the short chain comprises VH_B-L1-VL_A-CL sequentially from the N-terminus to the C-terminus, and the long chain comprises VH_C-L2-VH_A-CH1-h-CH2-CH3 sequentially from the N-terminus to the C-terminus; wherein the L, L1 and L2 are linker peptides, and the h is a hinge region or linker peptide such as “-”, GS or an amino acid sequence as set forth in any one of SEQ ID NOs: 495-519. The VL, VH, CL and CH herein all have conventional meanings in the art and represent light chain variable region, heavy chain variable region, light chain constant region and heavy chain constant region, respectively, wherein the CH includes CH1, CH2 and CH3; the _A, _B and _C represent the functional regions as protein functional region A, protein functional region B, and protein functional region C or compositions thereof, respectively; the “-” represents a polypeptide bond linking different structural regions or used to separate different structural regions; the C-terminus is the carboxyl-terminus of the peptide chain (which may also be written as “C′”), and the N-terminus is the amino-terminus of the peptide chain (which may also be written as “N′”). The different protein functional regions are fused on the same polypeptide chain, so that mismatched byproducts can be avoided. In some embodiments, L, L1 and L2 may be identical sequences. In other embodiments, L, L1 and L2 may be different sequences. The protein functional region of the present invention may be Fab, scFv or VH in some cases, or F(ab)₂ or a full-length antibody in other cases, and is also referred to as an antibody, an antigen-binding protein or a binding protein in certain cases. In some specific embodiments, the protein functional region A is also referred to as an antibody A against a first antigen or a first antigen-binding domain; the protein functional region B is also referred to as an antibody B against a second antigen or a second antigen-binding domain; the protein functional region C is also referred to as an antibody C against a third antigen or a third antigen-binding domain; the protein functional region D is also referred to as an antibody D against a fourth antigen or a fourth antigen-binding domain, and so on.

[0013] In some specific embodiments, (II) the binding protein is of an asymmetric structure, and the asymmetric structure is a left-right asymmetric IgG-like structure, wherein a left arm is a protein functional region A of a Fab or scFv structure, a right arm is a protein functional region B of a VH structure, and the protein functional region A and the protein functional region B are each linked to one Fc; preferably, the number of the protein functional region A is one, and the number of the protein functional regions B is one, two or three.

[0014] Preferably, when the number of the protein functional region B is one, the binding protein is a bivalent binding protein comprising a structure described as follows: the protein functional region A is of (d) a conventional Fab structure, or (e) a Fab (cross VH/VL) structure, or (f) a Fab (cross Fd/LC) structure; when the number of the protein functional region B is two, the binding protein is a trivalent binding protein comprising a structure described as follows: the protein functional region A of the left arm is of the (d), (e) or (f) structure, and a second protein functional region B is linked to the N-terminus or C-terminus of the protein functional region A of the left arm, or the N-terminus of the first protein functional region B of the right arm, or the C-terminus of the Fc, preferably, the second protein functional region B is linked to the N-terminus of the first protein functional region B of the right arm; when the number of the protein functional region B is three, the binding protein is a tetravalent binding protein specifically comprising a structure described as follows: the protein functional region A of the left arm is of the (d), (e) or (f) structure, and a third protein functional region B is further linked to the N-terminus or C-terminus of the protein functional region A of the left arm, or the N-terminus or C-terminus of a second protein functional region B of the left arm, or the N-terminus of a first or second protein functional region B of the right arm, or the C-terminus of the Fc, preferably, the second protein functional region B is linked to the N-terminus of the first protein functional region B of the right arm, and the third protein functional region B is linked to the N-terminus of the second protein functional region B.

[0015] When the number of the protein functional region B is one, the binding protein is a bivalent binding protein comprising a structure described as follows: the protein functional region A of the left arm is of (g) an scFv structure, wherein the scFv structure is linked to Fc via the terminus of VH or the terminus of VL; when the number of the protein functional region B is two, the binding protein is a trivalent binding protein specifically comprising a structure described as follows: the protein functional region A of the left arm is of the (g) structure, and a second protein functional region B is linked to the N-terminus of the protein functional region A of the left arm, or the N-terminus of the original protein functional region B of the right arm, or the C-terminus of the Fc, preferably, the second protein functional region B is linked to the N-terminus of a first protein functional region B of the right arm; when the number of the protein functional regions B is three, the binding protein is a tetravalent binding protein specifically comprising a structure described as follows: the protein functional region A of the left arm is of the (g) structure, a third protein functional region B is further linked to the N-terminus of the protein functional region A of the left arm, or the N-terminus or the C-terminus of a second protein functional region B, or the C-terminus of the Fc, preferably, the second protein functional region B is linked to the N-terminus of the first protein functional region B of the right arm, and the third protein functional region B is linked to the N-terminus of the second protein functional region B.

[0016] More preferably, the binding protein further comprises a protein functional region C, and the binding protein is a trivalent or multivalent multispecific binding protein, wherein the protein functional region C targets different antigens or antigenic epitopes with the protein functional region A and the protein functional region B, and the protein functional region C is linked to the N-terminus or C-terminus of the above binding protein; preferably, the protein functional region C is linked to the N-terminus of the protein functional region B of the above binding protein described in the (d), (e), (f) or (g); and

[0017] even more preferably, the binding protein further comprises a protein functional region D, and the binding protein is a tetravalent or multivalent multispecific binding protein, wherein specifically: the protein functional region D targets different antigens or antigenic epitopes with the protein functional region A, the protein functional region B and the protein functional region C, and the protein functional region D is linked to the N-terminus or C-terminus of the above binding protein; preferably, the protein functional region D is linked to the N-terminus of the protein functional region B of the above binding protein described in the (d), (e), (f) or (g).

[0018] Even more preferably, the binding protein has three polypeptide chains, including one polypeptide chain 1, one polypeptide chain 2 and one polypeptide chain 3. In the present invention, the polypeptide chain 1 is also referred to as a first polypeptide chain, the polypeptide chain 2 is also referred to as a second polypeptide chain, and the polypeptide chain 3 is also referred to as a third polypeptide chain, wherein (11) the polypeptide chain 1 comprises VL_A-CL sequentially from the N-terminus to the C-terminus, the polypeptide chain 2 comprises VH_A-CH1-h-CH2-CH3 sequentially from the N-terminus to the C-terminus, and the polypeptide chain 3 comprises VH_B-h-CH2-CH3 sequentially from the N-terminus to the C-terminus; or (12) the polypeptide chain 1 comprises VH_A-CL sequentially from the N-terminus to the C-terminus, the polypeptide chain 2 comprises VL_A-CH1-h-CH2-CH3 sequentially from the N-terminus to the C-terminus, and the polypeptide chain 3 comprises VH_B-h-CH2-CH3 sequentially from the N-terminus to the C-terminus; or (13) the polypeptide chain 1 comprises VH_A-CH1 sequentially from the N-terminus to the C-terminus, the polypeptide chain 2 comprises VL_A-CL-h-CH2-CH3 sequentially from the N-terminus to the C-terminus, and the polypeptide chain 3 comprises VH_B-h-CH2-CH3 sequentially from the N-terminus to the C-terminus; or (14) the polypeptide chain 1 comprises VL_A-CL sequentially from the N-terminus to the C-terminus, the polypeptide chain 2 comprises VH_A-CH1-h-CH2-CH3 sequentially from the N-terminus to the C-terminus, and the polypeptide chain 3 comprises VH_B-L-VH_B-h-CH2-CH3 sequentially from the N-terminus to the C-terminus; or (15) the polypeptide chain 1 comprises VL_A-CL sequentially from the N-terminus to the C-terminus, the polypeptide chain 2 comprises VH_A-CH1-h-CH2-CH3 sequentially from the N-terminus to the C-terminus, and the polypeptide chain 3 comprises VH_C-L-VH_B-h-CH2-CH3 sequentially from the N-terminus to the C-terminus; or (16) the polypeptide chain 1 comprises VH_A-CL sequentially from the N-terminus to the C-terminus, the polypeptide chain 2 comprises VL_A-CH1-h-CH2-CH3 sequentially from the N-terminus to the C-terminus, and the polypeptide chain 3 comprises VH_B-L-VH_B-h-CH2-CH3 sequentially from the N-terminus to the C-terminus; or (17) the polypeptide chain 1 comprises VH_A-CL sequentially from the N-terminus to the C-terminus, the polypeptide chain 2 comprises VL_A-CH1-h-CH2-CH3 sequentially from the N-terminus to the C-terminus, and the polypeptide chain 3 comprises VH_C-L-VH_B-h-CH2-CH3 sequentially from the N-terminus to the C-terminus; or (18) the polypeptide chain 1 comprises VH_A-CH1 sequentially from the N-terminus to the C-terminus, the polypeptide chain 2 comprises VL_A-CL-h-CH2-CH3 sequentially from the N-terminus to the C-terminus, and the polypeptide chain 3 comprises VH_B-L-VH_B-h-CH2-CH3 sequentially from the N-terminus to the C-terminus; or (19) the polypeptide chain 1 comprises VH_A-CH1 sequentially from the N-terminus to the C-terminus, the polypeptide chain 2 comprises VL_A-CL-h-CH2-CH3 sequentially from the N-terminus to the C-terminus, and the polypeptide chain 3 comprises VH_C-L-VH_B-h-CH2-CH3 sequentially from the N-terminus to the C-terminus; or (26) the polypeptide chain 1 comprises VL_A-CL sequentially from the N-terminus to the C-terminus, the polypeptide chain 2 comprises VH_A-CH1-h-CH2-CH3 sequentially from the N-terminus to the C-terminus, and the polypeptide chain 3 comprises VH_B-L1-VH_B-L2-VH_B-h-CH2-CH3 sequentially from the N-terminus to the C-terminus; or (27) the polypeptide chain 1 comprises VL_A-CL sequentially from the N-terminus to the C-terminus, the polypeptide chain 2 comprises VH_A-CH1-h-CH2-CH3 sequentially from the N-terminus to the C-terminus, and the polypeptide chain 3 comprises VH_D-L1-VH_C-L2-VH_B-h-CH2-CH3 sequentially from the N-terminus to the C-terminus; wherein the L, L1 and L2 are linker peptides, and the h is a hinge region or linker peptide such as “-”, GS or an amino acid sequence as set forth in any one of SEQ ID NOs: 495-519.

[0019] Even more preferably, the binding protein has two polypeptide chains, including one polypeptide chain 1 and one polypeptide chain 2. Likewise, the polypeptide 1 is also referred to as a first polypeptide chain and the polypeptide 2 is also referred to as a second polypeptide chain, wherein (20) the polypeptide chain 1 comprises VL_A-L-VH_A-h-CH2-CH3 sequentially from the N-terminus to the C-terminus, and the polypeptide chain 2 comprises VH_B-h-CH2-CH3 sequentially from the N-terminus to the C-terminus; or (21) the polypeptide chain 1 comprises VH_A-L-VL_A-h-CH2-CH3 sequentially from the N-terminus to the C-terminus, and the polypeptide chain 2 comprises VH_B-h-CH2-CH3 sequentially from the N-terminus to the C-terminus; or (22) the polypeptide chain 1 comprises VL_A-L1-VH_A-h-CH2-CH3 sequentially from the N-terminus to the C-terminus, and the polypeptide chain 2 comprises VH_B-L2-VH_B-h-CH2-CH3 sequentially from the N-terminus to the C-terminus; or (23) the polypeptide chain 1 comprises VH_A-L1-VL_A-h-CH2-CH3 sequentially from the N-terminus to the C-terminus, and the polypeptide chain 2 comprises VH_B-L2-VH_B-h-CH2-CH3 sequentially from the N-terminus to the C-terminus; or (24) the polypeptide chain 1 comprises VL_A-L1-VH_A-h-CH2-CH3 sequentially from the N-terminus to the C-terminus, and the polypeptide chain 2 comprises VH_C-L2-VH_B-CH2-CH3 sequentially from the N-terminus to the C-terminus; or (25) the polypeptide chain 1 comprises VH_A-L1-VL_A-h-CH2-CH3 sequentially from the N-terminus to the C-terminus, and the polypeptide chain 2 comprises VH_C-L2-VH_B-h-CH2-CH3 sequentially from the N-terminus to the C-terminus; wherein the L, L1 and L2 are linker peptides, and the h is a hinge region or linker peptide such as “-”, GS or an amino acid sequence as set forth in any one of SEQ ID NOs: 495-519.

[0020] In some specific embodiments, the binding protein comprises at least two protein functional regions, namely protein functional region A and protein functional region B, wherein the protein functional region A and the protein functional region B are each one of a PD-L1 antibody, an HER2 antibody, a B7H4 antibody, a CD3 antibody, a CTLA4 antibody, a 4-1BB antibody and a BCMA antibody. Preferably, the protein functional region A is a PD-L1 antibody, an HER2 antibody, a B7H4 antibody or a CD3 antibody, and the protein functional region B is a CTLA4 antibody, a 4-1BB antibody or a BCMA antibody. More preferably, the protein functional region A is a PD-L1 antibody, and the protein functional region B is a CTLA4 antibody; or, the protein functional region A is a PD-L1 antibody, and the protein functional region B is a 4-1BB antibody; or, the protein functional region A is an HER2 antibody, and the protein functional region B is a CTLA4 antibody; or, the protein functional region A is a B7H4 antibody, and the protein functional region B is a 4-1BB antibody; or, the protein functional region A is a CD3 antibody, and the protein functional region B is a BCMA antibody.

[0021] In some specific embodiments, the PD-L1 antibody comprises a light chain variable region and a heavy chain variable region, wherein the light chain variable region VL comprises LCDR1, LCDR2 and LCDR3 with amino acid sequences as set forth in SEQ ID NOs: 167, 188 and 211, respectively; and the heavy chain variable region VH comprises HCDR1, HCDR2 and HCDR3 with amino acid sequences as set forth in SEQ ID NOs: 15, 62 and 122, respectively; or, the light chain variable region VL comprises LCDR1, LCDR2 and LCDR3 with amino acid sequences as set forth in SEQ ID NOs: 167, 188 and 211, respectively; and the heavy chain variable region VH comprises HCDR1, HCDR2 and HCDR3 with amino acid sequences as set forth in SEQ ID NOs: 15, 69 and 122, respectively. The amino acid sequences of the listed CDRs are shown according to the Chothia scheme. Preferably, the light chain variable region VL comprises an amino acid sequence as set forth in SEQ ID NO: 282; and the heavy chain variable region VH comprises an amino acid sequence as set forth in SEQ ID NO: 233; or, the light chain variable region VL comprises an amino acid sequence as set forth in SEQ ID NO: 282; and the heavy chain variable region VH comprises an amino acid sequence as set forth in SEQ ID NO: 240. More preferably, the PD-L1 antibody comprises two polypeptide chains; wherein a first polypeptide chain comprises an amino acid sequence as set forth in SEQ ID NO: 347, and a second polypeptide chain comprises an amino acid sequence as set forth in SEQ ID NO: 300; or, a first polypeptide chain comprises an amino acid sequence as set forth in SEQ ID NO: 353, and a second polypeptide chain comprises an amino acid sequence as set forth in SEQ ID NO: 308; or, a first polypeptide chain comprises an amino acid sequence as set forth in SEQ ID NO: 353, and a second polypeptide chain comprises an amino acid sequence as set forth in SEQ ID NO: 310.

[0022] In some specific embodiments, the PD-L1 antibody has an amino acid sequence as shown in that of atezolizumab known in the art.

[0023] In some specific embodiments, the HER2 antibody has an amino acid sequence as shown in that of trastuzumab or pertuzumab known in the art.

[0024] In some specific embodiments, the B7H4 antibody comprises a light chain variable region and a heavy chain variable region, wherein the light chain variable region VL comprises LCDR1, LCDR2 and LCDR3 with amino acid sequences as set forth in SEQ ID NOs: 180, 191 and 225, respectively; and the heavy chain variable region VH comprises HCDR1, HCDR2 and HCDR3 with amino acid sequences as set forth in SEQ ID NOs: 32, 87 and 143, respectively; or, the light chain variable region VL comprises LCDR1, LCDR2 and LCDR3 with amino acid sequences as set forth in SEQ ID NOs: 177, 191 and 226, respectively; and the heavy chain variable region VH comprises HCDR1, HCDR2 and HCDR3 with amino acid sequences as set forth in SEQ ID NOs: 33, 88 and 144, respectively. The amino acid sequences of the listed CDRs are shown according to the Chothia scheme. Preferably, the light chain variable region VL comprises an amino acid sequence as set forth in SEQ ID NO: 298; and the heavy chain variable region VH comprises an amino acid sequence as set forth in SEQ ID NO: 261; or, the light chain variable region VL comprises an amino acid sequence as set forth in SEQ ID NO: 299; and the heavy chain variable region VH comprises an amino acid sequence as set forth in SEQ ID NO: 262. More preferably, the B7H4 antibody comprises two polypeptide chains; wherein a first polypeptide chain comprises an amino acid sequence as set forth in SEQ ID NO: 360, and a second polypeptide chain comprises an amino acid sequence as set forth in SEQ ID NO: 326; or, a first polypeptide chain comprises an amino acid sequence as set forth in SEQ ID NO: 361, and a second polypeptide chain comprises an amino acid sequence as set forth in SEQ ID NO: 327.

[0025] In some specific embodiments, the CTLA4 antibody comprises a heavy chain variable region, wherein the heavy chain variable region VH comprises HCDR1, HCDR2 and HCDR3 with amino acid sequences as set forth in SEQ ID NOs: 17, 65 and 125, respectively. The amino acid sequences of the listed CDRs are shown according to the Chothia scheme. Preferably, the heavy chain variable region VH comprises an amino acid sequence as set forth in SEQ ID NO: 236. More preferably, the CTLA4 antibody comprises one polypeptide chain, wherein the polypeptide chain comprises an amino acid sequence as set forth in SEQ ID NO: 303 or an amino acid sequence as set forth in SEQ ID NO: 306.

[0026] In some specific embodiments, the 4-1BB antibody comprises a light chain variable region and a heavy chain variable region, wherein the light chain variable region VL comprises LCDR1, LCDR2 and LCDR3 with amino acid sequences as set forth in SEQ ID NOs: 170, 191 and 214, respectively; and the heavy chain variable region VH comprises HCDR1, HCDR2 and HCDR3 with amino acid sequences as set forth in SEQ ID NOs: 18, 66 and 126, respectively; or, the light chain variable region VL comprises LCDR1, LCDR2 and LCDR3 with amino acid sequences as set forth in SEQ ID NOs: 170, 191 and 214, respectively; and the heavy chain variable region VH comprises HCDR1, HCDR2 and HCDR3 with amino acid sequences as set forth in SEQ ID NOs: 18, 71 and 126, respectively. The amino acid sequences of the listed CDRs are shown according to the Chothia scheme. Preferably, the light chain variable region VL comprises an amino acid sequence as set forth in SEQ ID NO: 285; and the heavy chain variable region VH comprises an amino acid sequence as set forth in SEQ ID NO: 237; or, the light chain variable region VL comprises an amino acid sequence as set forth in SEQ ID NO: 289; and the heavy chain variable region VH comprises an amino acid sequence as set forth in SEQ ID NO: 242. More preferably, the 4-1BB antibody comprises two polypeptide chains; wherein a first polypeptide chain comprises an amino acid sequence as set forth in SEQ ID NO: 350, and a second polypeptide chain comprises an amino acid sequence as set forth in SEQ ID NO: 304; or, a first polypeptide chain comprises an amino acid sequence as set forth in SEQ ID NO: 355, and a second polypeptide chain comprises an amino acid sequence as set forth in SEQ ID NO: 311.

[0027] In some specific embodiments, the 4-1BB antibody comprises a heavy chain variable region, wherein the heavy chain variable region VH comprises HCDR1, HCDR2 and HCDR3 with amino acid sequences as set forth in SEQ ID NOs: 27, 79 and 137, respectively; or, the heavy chain variable region VH comprises HCDR1, HCDR2 and HCDR3 with amino acid sequences as set forth in SEQ ID NOs: 28, 80 and 138, respectively; or, the heavy chain variable region VH comprises HCDR1, HCDR2 and HCDR3 with amino acid sequences as set forth in SEQ ID NOs: 29, 82 and 138, respectively; or, the heavy chain variable region VH comprises HCDR1, HCDR2 and HCDR3 with amino acid sequences as set forth in SEQ ID NOs: 28, 89 and 145, respectively; or, the heavy chain variable region VH comprises HCDR1, HCDR2 and HCDR3 with amino acid sequences as set forth in SEQ ID NO: 28, 81 and 139, respectively; or, the heavy chain variable region VH comprises HCDR1, HCDR2 and HCDR3 with amino acid sequences as set forth in SEQ ID NOs: 15, 83 and 140, respectively. The amino acid sequences of the listed CDRs are shown according to the Chothia scheme. Preferably, the heavy chain variable region VH comprises an amino acid sequence as set forth in SEQ ID NO: 252; or, the heavy chain variable region VH comprises an amino acid sequence as set forth in SEQ ID NO: 253; or, the heavy chain variable region VH comprises an amino acid sequence as set forth in SEQ ID NO: 255; or, the heavy chain variable region VH comprises an amino acid sequence as set forth in SEQ ID NO: 264; or, the heavy chain variable region VH comprises an amino acid sequence as set forth in SEQ ID NO: 254; or, the heavy chain variable region VH comprises an amino acid sequence as set forth in SEQ ID NO: 256. More preferably, the 4-1BB antibody comprises one polypeptide chain, wherein the polypeptide chain comprises an amino acid sequence as set forth in SEQ ID NO: 320, an amino acid sequence as set forth in SEQ ID NO: 321, an amino acid sequence as set forth in SEQ ID NO: 323, an amino acid sequence as set forth in SEQ ID NO: 322, an amino acid sequence as set forth in SEQ ID NO: 324 or an amino acid sequence as set forth in SEQ ID NO: 329.

[0028] In some specific embodiments, the CD3 antibody comprises a light chain variable region and a heavy chain variable region, wherein the light chain variable region VL comprises LCDR1, LCDR2 and LCDR3 with amino acid sequences as set forth in SEQ ID NOs: 177, 191 and 221, respectively; and the heavy chain variable region VH comprises HCDR1, HCDR2 and HCDR3 with amino acid sequences as set forth in SEQ ID NOs: 15, 84 and 141, respectively; or, the light chain variable region VL comprises LCDR1, LCDR2 and LCDR3 with amino acid sequences as set forth in SEQ ID NOs: 178, 197 and 222, respectively; and the heavy chain variable region VH comprises HCDR1, HCDR2 and HCDR3 with amino acid sequences as set forth in SEQ ID NOs: 31, 85 and 142, respectively; or, the light chain variable region VL comprises LCDR1, LCDR2 and LCDR3 with amino acid sequences as set forth in SEQ ID NOs: 177, 191 and 223, respectively; and the heavy chain variable region VH comprises HCDR1, HCDR2 and HCDR3 with amino acid sequences as set forth in SEQ ID NOs: 31, 86 and 141, respectively; or, the light chain variable region VL comprises LCDR1, LCDR2 and LCDR3 with amino acid sequences as set forth in SEQ ID NOs: 179, 198 and 224, respectively; and the heavy chain variable region VH comprises HCDR1, HCDR2 and HCDR3 with amino acid sequences as set forth in SEQ ID NOs: 31, 85 and 142, respectively. The amino acid sequences of the listed CDRs are shown according to the Chothia scheme. Preferably, the light chain variable region VL comprises an amino acid sequence as set forth in SEQ ID NO: 294; and the heavy chain variable region VH comprises an amino acid sequence as set forth in SEQ ID NO: 258; or, the light chain variable region VL comprises an amino acid sequence as set forth in SEQ ID NO: 295; and the heavy chain variable region VH comprises an amino acid sequence as set forth in SEQ ID NO: 259; or, the light chain variable region VL comprises an amino acid sequence as set forth in SEQ ID NO: 296; and the heavy chain variable region VH comprises an amino acid sequence as set forth in SEQ ID NO: 260; or, the light chain variable region VL comprises an amino acid sequence as set forth in SEQ ID NO: 297; and the heavy chain variable region VH comprises an amino acid sequence as set forth in SEQ ID NO: 259.

[0029] In some specific embodiments, the CD3 antibody comprises a light chain variable region and a heavy chain variable region, wherein the light chain variable region VL comprises LCDR1, LCDR2 and LCDR3 with amino acid sequences as set forth in SEQ ID NOs: 172, 192 and 216, respectively; the heavy chain variable region VH comprises HCDR1, HCDR2 and HCDR3 with amino acid sequences as set forth in SEQ ID NOs: 20, 68 and 128, respectively; or, the light chain variable region VL comprises LCDR1, LCDR2 and LCDR3 with amino acid sequences as set forth in SEQ ID NOs: 172, 192 and 216, respectively; and the heavy chain variable region VH comprises HCDR1, HCDR2 and HCDR3 with amino acid sequences as set forth in SEQ ID NOs: 30, 68 and 128, respectively. The amino acid sequences of the listed CDRs are shown according to the Chothia scheme. Preferably, the light chain variable region VL comprises an amino acid sequence as set forth in SEQ ID NO: 291; and the heavy chain variable region VH comprises an amino acid sequence as set forth in SEQ ID NO: 245; or, the light chain variable region VL comprises an amino acid sequence as set forth in SEQ ID NO: 291; and the heavy chain variable region VH comprises an amino acid sequence as set forth in SEQ ID NO: 257; or, the light chain variable region VL comprises an amino acid sequence as set forth in SEQ ID NO: 291; and the heavy chain variable region VH comprises an amino acid sequence as set forth in SEQ ID NO: 263; or, the light chain variable region VL comprises an amino acid sequence as set forth in SEQ ID NO: 291; and the heavy chain variable region VH comprises an amino acid sequence as set forth in SEQ ID NO: 281; or, the light chain variable region VL comprises an amino acid sequence as set forth in SEQ ID NO: 291; and the heavy chain variable region VH comprises an amino acid sequence as set forth in SEQ ID NO: 244.

[0030] In some specific embodiments, the CD3 antibody comprises two polypeptide chains, wherein a first polypeptide chain (VL) comprises an amino acid sequence as set forth in SEQ ID NO: 357, and a second polypeptide chain (VH) comprises an amino acid sequence as set forth in SEQ ID NO: 313; or, a first polypeptide chain comprises an amino acid sequence as set forth in SEQ ID NO: 357, and a second polypeptide chain comprises an amino acid sequence as set forth in SEQ ID NO: 325; or, a first polypeptide chain comprises an amino acid sequence as set forth in SEQ ID NO: 357, and a second polypeptide chain comprises an amino acid sequence as set forth in SEQ ID NO: 328; or, a first polypeptide chain comprises an amino acid sequence as set forth in SEQ ID NO: 357, and a second polypeptide chain comprises an amino acid sequence as set forth in SEQ ID NO: 346.

[0031] In some specific embodiments, the CD3 antibody comprises one polypeptide chain, wherein the polypeptide chain comprises an amino acid sequence as set forth in SEQ ID NO: 489, an amino acid sequence as set forth in SEQ ID NO: 490, an amino acid sequence as set forth in SEQ ID NO: 491, an amino acid sequence as set forth in SEQ ID NO: 492 or an amino acid sequence as set forth in SEQ ID NO: 493.

[0032] In some specific embodiments, the BCMA antibody comprises a heavy chain variable region, wherein the heavy chain variable region VH comprises HCDR1, HCDR2 and HCDR3 with amino acid sequences as set forth in SEQ ID NOs: 15, 75 and 133, respectively; or, the heavy chain variable region VH comprises HCDR1, HCDR2 and HCDR3 with amino acid sequences as set forth in SEQ ID NOs: 24, 76 and 134, respectively; or, the heavy chain variable region VH comprises HCDR1, HCDR2 and HCDR3 with amino acid sequences as set forth in SEQ ID NOs: 25, 77 and 135, respectively; or, the heavy chain variable region VH comprises HCDR1, HCDR2 and HCDR3 with amino acid sequences as set forth in SEQ ID NOs: 26, 78 and 136, respectively. The amino acid sequences of the listed CDRs are shown according to the Chothia scheme. Preferably, the heavy chain variable region VH comprises an amino acid sequence as set forth in SEQ ID NO: 248; or, the heavy chain variable region VH comprises an amino acid sequence as set forth in SEQ ID NO: 249; or, the heavy chain variable region VH comprises an amino acid sequence as set forth in SEQ ID NO: 250; or, the heavy chain variable region VH comprises an amino acid sequence as set forth in SEQ ID NO: 251. More preferably, the BCMA antibody comprises one polypeptide chain, wherein the polypeptide chain comprises an amino acid sequence as set forth in SEQ ID NO: 316, an amino acid sequence as set forth in SEQ ID NO: 317, an amino acid sequence as set forth in SEQ ID NO: 318 or an amino acid sequence as set forth in SEQ ID NO: 319.

[0033] In some specific embodiments, the BCMA antibody comprises a heavy chain variable region, wherein the heavy chain variable region VH comprises HCDR1, HCDR2 and HCDR3 with amino acid sequences as set forth in SEQ ID NOs: 26, 90 and 136, respectively; or, the heavy chain variable region VH comprises HCDR1, HCDR2 and HCDR3 with amino acid sequences as set forth in SEQ ID NOs: 34, 78 and 146, respectively; or, the heavy chain variable region VH comprises HCDR1, HCDR2 and HCDR3 with amino acid sequences as set forth in SEQ ID NOs: 35, 78 and 147, respectively; or, the heavy chain variable region VH comprises HCDR1, HCDR2 and HCDR3 with amino acid sequences as set forth in SEQ ID NOs: 35, 90 and 147, respectively; or, the heavy chain variable region VH comprises HCDR1, HCDR2 and HCDR3 with amino acid sequences as set forth in SEQ ID NOs: 36, 90 and 146, respectively; or, the heavy chain variable region VH comprises HCDR1, HCDR2 and HCDR3 with amino acid sequences as set forth in SEQ ID NOs: 35, 76 and 147, respectively; or, the heavy chain variable region VH comprises HCDR1, HCDR2 and HCDR3 with amino acid sequences as set forth in SEQ ID NOs: 34, 78 and 148, respectively; or, the heavy chain variable region VH comprises HCDR1, HCDR2 and HCDR3 with amino acid sequences as set forth in SEQ ID NOs: 35, 76 and 136, respectively; or, the heavy chain variable region VH comprises HCDR1, HCDR2 and HCDR3 with amino acid sequences as set forth in SEQ ID NOs: 35, 90 and 146, respectively; or, the heavy chain variable region VH comprises HCDR1, HCDR2 and HCDR3 with amino acid sequences as set forth in SEQ ID NOs: 34, 76 and 136, respectively; or, the heavy chain variable region VH comprises HCDR1, HCDR2 and HCDR3 with amino acid sequences as set forth in SEQ ID NOs: 35, 76 and 146, respectively; or, the heavy chain variable region VH comprises HCDR1, HCDR2 and HCDR3 with amino acid sequences as set forth in SEQ ID NOs: 34, 76 and 146, respectively; or, the heavy chain variable region VH comprises HCDR1, HCDR2 and HCDR3 with amino acid sequences as set forth in SEQ ID NOs: 35, 90 and 148, respectively; or, the heavy chain variable region VH comprises HCDR1, HCDR2 and HCDR3 with amino acid sequences as set forth in SEQ ID NOs: 35, 90 and 136, respectively. The amino acid sequences of the listed CDRs are shown according to the Chothia scheme. Preferably, the heavy chain variable region VH comprises an amino acid sequence as set forth in SEQ ID NO: 265; or, the heavy chain variable region VH comprises an amino acid sequence as set forth in SEQ ID NO: 266; or, the heavy chain variable region VH comprises an amino acid sequence as set forth in SEQ ID NO: 267; or, the heavy chain variable region VH comprises an amino acid sequence as set forth in SEQ ID NO: 268; or, the heavy chain variable region VH comprises an amino acid sequence as set forth in SEQ ID NO: 269; or, the heavy chain variable region VH comprises an amino acid sequence as set forth in SEQ ID NO: 270; or, the heavy chain variable region VH comprises an amino acid sequence as set forth in SEQ ID NO: 271; or, the heavy chain variable region VH comprises an amino acid sequence as set forth in SEQ ID NO: 272; or, the heavy chain variable region VH comprises an amino acid sequence as set forth in SEQ ID NO: 273; or, the heavy chain variable region VH comprises an amino acid sequence as set forth in SEQ ID NO: 274; or, the heavy chain variable region VH comprises an amino acid sequence as set forth in SEQ ID NO: 275; or, the heavy chain variable region VH comprises an amino acid sequence as set forth in SEQ ID NO: 276; or, the heavy chain variable region VH comprises an amino acid sequence as set forth in SEQ ID NO: 277; or, the heavy chain variable region VH comprises an amino acid sequence as set forth in SEQ ID NO: 278; or, the heavy chain variable region VH comprises an amino acid sequence as set forth in SEQ ID NO: 279; or, the heavy chain variable region VH comprises an amino acid sequence as set forth in SEQ ID NO: 280. More preferably, the BCMA antibody comprises one polypeptide chain, wherein the polypeptide chain comprises an amino acid sequence as set forth in SEQ ID NO: 330; or, an amino acid sequence as set forth in SEQ ID NO: 331; or, an amino acid sequence as set forth in SEQ ID NO: 332; or, an amino acid sequence as set forth in SEQ ID NO: 333; or, an amino acid sequence as set forth in SEQ ID NO: 334; or, an amino acid sequence as set forth in SEQ ID NO: 335; or, an amino acid sequence as set forth in SEQ ID NO: 336; or, an amino acid sequence as set forth in SEQ ID NO: 337; or, an amino acid sequence as set forth in SEQ ID NO: 338; or, an amino acid sequence as set forth in SEQ ID NO: 339; or, an amino acid sequence as set forth in SEQ ID NO: 340; or, an amino acid sequence as set forth in SEQ ID NO: 341; or, an amino acid sequence as set forth in SEQ ID NO: 342; or, an amino acid sequence as set forth in SEQ ID NO: 343; or, an amino acid sequence as set forth in SEQ ID NO: 344; or, an amino acid sequence as set forth in SEQ ID NO: 345.

[0034] In some specific embodiments, the protein functional region C is a heavy chain variable region of the BCMA heavy-chain antibody, wherein the heavy chain variable region VH comprises HCDR1, HCDR2 and HCDR3 with amino acid sequences as set forth in SEQ ID NOs: 24, 76 and 134, respectively; or, the heavy chain variable region VH comprises HCDR1, HCDR2 and HCDR3 with amino acid sequences as set forth in SEQ ID NOs: 26, 78 and 136, respectively. Preferably, the heavy chain variable region VH comprises an amino acid sequence as set forth in SEQ ID NO: 249; or, the heavy chain variable region VH comprises an amino acid sequence as set forth in SEQ ID NO: 251.

[0035] In the above specific embodiments, the binding protein may further comprise a light chain constant region, wherein the light chain constant region is preferably a human light chain constant region, and more preferably a human light chain constant region Cκ or Cλ.

[0036] In the above specific embodiments, the binding protein may further comprise a heavy chain constant region (CH1, CH2 and/or CH3), wherein the heavy chain constant region is preferably a human heavy chain constant region, and more preferably a human IgG1, IgG2, IgG3 or IgG4 heavy chain constant region. In some specific embodiments, the IgG1 heavy chain constant region has one or more of the mutations of C220S, N297A, L234A, L235A, P329G, S239D, I332E, S354C, T366W, Y349C, T366S, L368A, Y407V, M252Y, S254T, T256E and others on the Fc, and sites of the mutations are numbered according to an EU numbering scheme.

[0037] In some preferred embodiments, the binding protein comprises a protein functional region A and a protein functional region B, wherein: the protein functional region A comprises a light chain variable region and a heavy chain variable region, wherein the light chain variable region VL comprises LCDR1, LCDR2 and LCDR3 with amino acid sequences as set forth in SEQ ID NOs: 167, 188 and 211, respectively; and the heavy chain variable region VH comprises HCDR1, HCDR2 and HCDR3 with amino acid sequences as set forth in SEQ ID NOs: 15, 69 and 122, respectively; and the protein functional region B comprises a heavy chain variable region, wherein the heavy chain variable region VH comprises HCDR1, HCDR2 and HCDR3 with amino acid sequences as set forth in SEQ ID NOs: 17, 65 and 125, respectively; or,
[0038] the protein functional region A comprises a light chain variable region and a heavy chain variable region, wherein the light chain variable region VL comprises LCDR1, LCDR2 and LCDR3 with amino acid sequences as set forth in SEQ ID NOs: 167, 188 and 211, respectively; and the heavy chain variable region VH comprises HCDR1, HCDR2 and HCDR3 with amino acid sequences as set forth in SEQ ID NOs: 15, 62 and 122, respectively; and the protein functional region B comprises a heavy chain variable region, wherein the heavy chain variable region VH comprises HCDR1, HCDR2 and HCDR3 with amino acid sequences as set forth in SEQ ID NOs: 17, 65 and 125, respectively; or,
[0039] the protein functional region A comprises a light chain variable region and a heavy chain variable region, wherein the light chain variable region VL comprises LCDR1, LCDR2 and LCDR3 with amino acid sequences as set forth in SEQ ID NOs: 171, 190 and 215, respectively; and the heavy chain variable region VH comprises HCDR1, HCDR2 and HCDR3 with amino acid sequences as set forth in SEQ ID NOs: 19, 67 and 127, respectively; and the protein functional region B comprises a heavy chain variable region, wherein the heavy chain variable region VH comprises HCDR1, HCDR2 and HCDR3 with amino acid sequences as set forth in SEQ ID NOs: 17, 65 and 125, respectively; or,
[0040] the protein functional region A comprises a light chain variable region and a heavy chain variable region, wherein the light chain variable region VL comprises LCDR1, LCDR2 and LCDR3 with amino acid sequences as set forth in SEQ ID NOs: 176, 196 and 220, respectively; and the heavy chain variable region VH comprises HCDR1, HCDR2 and HCDR3 with amino acid sequences as set forth in SEQ ID NOs: 23, 74 and 132, respectively; and the protein functional region B comprises a heavy chain variable region, wherein the heavy chain variable region VH comprises HCDR1, HCDR2 and HCDR3 with amino acid sequences as set forth in SEQ ID NOs: 17, 65 and 125, respectively; or,
[0041] the protein functional region A comprises a light chain variable region and a heavy chain variable region, wherein the light chain variable region VL comprises LCDR1, LCDR2 and LCDR3 with amino acid sequences as set forth in SEQ ID NOs: 167, 188 and 211, respectively; and the heavy chain variable region VH comprises HCDR1, HCDR2 and HCDR3 with amino acid sequences as set forth in SEQ ID NOs: 15, 69 and 122, respectively; and the protein functional region B comprises a heavy chain variable region, wherein the heavy chain variable region VH comprises HCDR1, HCDR2 and HCDR3 with amino acid sequences as set forth in SEQ ID NOs: 28, 80 and 138, respectively; or,
[0042] the protein functional region A comprises a light chain variable region and a heavy chain variable region, wherein the light chain variable region VL comprises LCDR1, LCDR2 and LCDR3 with amino acid sequences as set forth in SEQ ID NOs: 167, 188 and 211, respectively; and the heavy chain variable region VH comprises HCDR1, HCDR2 and HCDR3 with amino acid sequences as set forth in SEQ ID NOs: 15, 69 and 122, respectively; and the protein functional region B comprises a heavy chain variable region, wherein the heavy chain variable region VH comprises HCDR1, HCDR2 and HCDR3 with amino acid sequences as set forth in SEQ ID NOs: 27, 79 and 137, respectively; or,
[0043] the protein functional region A comprises a light chain variable region and a heavy chain variable region, wherein the light chain variable region VL comprises LCDR1, LCDR2 and LCDR3 with amino acid sequences as set forth in SEQ ID NOs: 167, 188 and 211, respectively; and the heavy chain variable region VH comprises HCDR1, HCDR2 and HCDR3 with amino acid sequences as set forth in SEQ ID NOs: 15, 69 and 122, respectively; and the protein functional region B comprises a heavy chain variable region, wherein the heavy chain variable region VH comprises HCDR1, HCDR2 and HCDR3 with amino acid sequences as set forth in SEQ ID NOs: 29, 82 and 138, respectively; or,
[0044] the protein functional region A comprises a light chain variable region and a heavy chain variable region, wherein the light chain variable region VL comprises LCDR1, LCDR2 and LCDR3 with amino acid sequences as set forth in SEQ ID NOs: 180, 191 and 225, respectively; and the heavy chain variable region VH comprises HCDR1, HCDR2 and HCDR3 with amino acid sequences as set forth in SEQ ID NOs: 32, 87 and 143, respectively; and the protein functional region B comprises a heavy chain variable region, wherein the heavy chain variable region VH comprises HCDR1, HCDR2 and HCDR3 with amino acid sequences as set forth in SEQ ID NOs: 28, 80 and 138, respectively; or,
[0045] the protein functional region A comprises a light chain variable region and a heavy chain variable region, wherein the light chain variable region VL comprises LCDR1, LCDR2 and LCDR3 with amino acid sequences as set forth in SEQ ID NOs: 180, 191 and 225, respectively; and the heavy chain variable region VH comprises HCDR1, HCDR2 and HCDR3 with amino acid sequences as set forth in SEQ ID NOs: 32, 87 and 143, respectively; and the protein functional region B comprises a heavy chain variable region, wherein the heavy chain variable region VH comprises HCDR1, HCDR2 and HCDR3 with amino acid sequences as set forth in SEQ ID NOs: 27, 79 and 137, respectively; or,
[0046] the protein functional region A comprises a light chain variable region and a heavy chain variable region, wherein the light chain variable region VL comprises LCDR1, LCDR2 and LCDR3 with amino acid sequences as set forth in SEQ ID NOs: 180, 191 and 225, respectively; and the heavy chain variable region VH comprises HCDR1, HCDR2 and HCDR3 with amino acid sequences as set forth in SEQ ID NOs: 32, 87 and 143, respectively; and the protein functional region B comprises a heavy chain variable region, wherein the heavy chain variable region VH comprises HCDR1, HCDR2 and HCDR3 with amino acid sequences as set forth in SEQ ID NOs: 28, 89 and 145, respectively; or,
[0047] the protein functional region A comprises a light chain variable region and a heavy chain variable region, wherein the light chain variable region VL comprises LCDR1, LCDR2 and LCDR3 with amino acid sequences as set forth in SEQ ID NOs: 177, 191 and 226, respectively; and the heavy chain variable region VH comprises HCDR1, HCDR2 and HCDR3 with amino acid sequences as set forth in SEQ ID NOs: 33, 88 and 144, respectively; and the protein functional region B comprises a heavy chain variable region, wherein the heavy chain variable region VH comprises HCDR1, HCDR2 and HCDR3 with amino acid sequences as set forth in SEQ ID NOs: 28, 80 and 138, respectively; or,
[0048] the protein functional region A comprises a light chain variable region and a heavy chain variable region, wherein the light chain variable region VL comprises LCDR1, LCDR2 and LCDR3 with amino acid sequences as set forth in SEQ ID NOs: 177, 191 and 226, respectively; and the heavy chain variable region VH comprises HCDR1, HCDR2 and HCDR3 with amino acid sequences as set forth in SEQ ID NOs: 33, 88 and 144, respectively; and the protein functional region B comprises a heavy chain variable region, wherein the heavy chain variable region VH comprises HCDR1, HCDR2 and HCDR3 with amino acid sequences as set forth in SEQ ID NOs: 28, 81 and 139, respectively; or,
[0049] the protein functional region A comprises a light chain variable region and a heavy chain variable region, wherein the light chain variable region VL comprises LCDR1, LCDR2 and LCDR3 with amino acid sequences as set forth in SEQ ID NOs: 177, 191 and 226, respectively; and the heavy chain variable region VH comprises HCDR1, HCDR2 and HCDR3 with amino acid sequences as set forth in SEQ ID NOs: 33, 88 and 144, respectively; and the protein functional region B comprises a heavy chain variable region, wherein the heavy chain variable region VH comprises HCDR1, HCDR2 and HCDR3 with amino acid sequences as set forth in SEQ ID NOs: 15, 83 and 140, respectively; or,
[0050] the protein functional region A comprises a light chain variable region and a heavy chain variable region, wherein the light chain variable region VL comprises LCDR1, LCDR2 and LCDR3 with amino acid sequences as set forth in SEQ ID NOs: 172, 192 and 216, respectively; and the heavy chain variable region VH comprises HCDR1, HCDR2 and HCDR3 with amino acid sequences as set forth in SEQ ID NOs: 20, 68 and 128, respectively; and the protein functional region B comprises a heavy chain variable region, wherein the heavy chain variable region VH comprises HCDR1, HCDR2 and HCDR3 with amino acid sequences as set forth in SEQ ID NOs: 24, 76 and 134, respectively; or,
[0051] the protein functional region A comprises a light chain variable region and a heavy chain variable region, wherein the light chain variable region VL comprises LCDR1, LCDR2 and LCDR3 with amino acid sequences as set forth in SEQ ID NOs: 172, 192 and 216, respectively; and the heavy chain variable region VH comprises HCDR1, HCDR2 and HCDR3 with amino acid sequences as set forth in SEQ ID NOs: 20, 68 and 128, respectively; and the protein functional region B comprises a heavy chain variable region, wherein the heavy chain variable region VH comprises HCDR1, HCDR2 and HCDR3 with amino acid sequences as set forth in SEQ ID NOs: 26, 78 and 136, respectively; or,
[0052] the protein functional region A comprises a light chain variable region and a heavy chain variable region, wherein the light chain variable region VL comprises LCDR1, LCDR2 and LCDR3 with amino acid sequences as set forth in SEQ ID NOs: 172, 192 and 216, respectively; and the heavy chain variable region VH comprises HCDR1, HCDR2 and HCDR3 with amino acid sequences as set forth in SEQ ID NOs: 20, 68 and 128, respectively; and the protein functional region B comprises a heavy chain variable region, wherein the heavy chain variable region VH comprises HCDR1, HCDR2 and HCDR3 with amino acid sequences as set forth in SEQ ID NOs: 15, 75 and 133, respectively; or,
[0053] the protein functional region A comprises a light chain variable region and a heavy chain variable region, wherein the light chain variable region VL comprises LCDR1, LCDR2 and LCDR3 with amino acid sequences as set forth in SEQ ID NOs: 172, 192 and 216, respectively; and the heavy chain variable region VH comprises HCDR1, HCDR2 and HCDR3 with amino acid sequences as set forth in SEQ ID NOs: 30, 68 and 128, respectively; and the protein functional region B comprises a heavy chain variable region, wherein the heavy chain variable region VH comprises HCDR1, HCDR2 and HCDR3 with amino acid sequences as set forth in SEQ ID NOs: 15, 75 and 133, respectively; or,
[0054] the protein functional region A comprises a light chain variable region and a heavy chain variable region, wherein the light chain variable region VL comprises LCDR1, LCDR2 and LCDR3 with amino acid sequences as set forth in SEQ ID NOs: 172, 192 and 216, respectively; and the heavy chain variable region VH comprises HCDR1, HCDR2 and HCDR3 with amino acid sequences as set forth in SEQ ID NOs: 30, 68 and 128, respectively; and the protein functional region B comprises a heavy chain variable region, wherein the heavy chain variable region VH comprises HCDR1, HCDR2 and HCDR3 with amino acid sequences as set forth in SEQ ID NOs: 26, 78 and 136, respectively; or,
[0055] the protein functional region A comprises a light chain variable region and a heavy chain variable region, wherein the light chain variable region VL comprises LCDR1, LCDR2 and LCDR3 with amino acid sequences as set forth in SEQ ID NOs: 172, 192 and 216, respectively; and the heavy chain variable region VH comprises HCDR1, HCDR2 and HCDR3 with amino acid sequences as set forth in SEQ ID NOs: 30, 68 and 128, respectively; and the protein functional region B comprises a heavy chain variable region, wherein the heavy chain variable region VH comprises HCDR1, HCDR2 and HCDR3 with amino acid sequences as set forth in SEQ ID NOs: 26, 90 and 136, respectively; or,
[0056] the protein functional region A comprises a light chain variable region and a heavy chain variable region, wherein the light chain variable region VL comprises LCDR1, LCDR2 and LCDR3 with amino acid sequences as set forth in SEQ ID NOs: 172, 192 and 216, respectively; and the heavy chain variable region VH comprises HCDR1, HCDR2 and HCDR3 with amino acid sequences as set forth in SEQ ID NOs: 30, 68 and 128, respectively; and the protein functional region B comprises a heavy chain variable region, wherein the heavy chain variable region VH comprises HCDR1, HCDR2 and HCDR3 with amino acid sequences as set forth in SEQ ID NOs: 36, 90 and 146, respectively; or,
[0057] the protein functional region A comprises a light chain variable region and a heavy chain variable region, wherein the light chain variable region VL comprises LCDR1, LCDR2 and LCDR3 with amino acid sequences as set forth in SEQ ID NOs: 172, 192 and 216, respectively; and the heavy chain variable region VH comprises HCDR1, HCDR2 and HCDR3 with amino acid sequences as set forth in SEQ ID NOs: 30, 68 and 128, respectively; and the protein functional region B comprises a heavy chain variable region, wherein the heavy chain variable region VH comprises HCDR1, HCDR2 and HCDR3 with amino acid sequences as set forth in SEQ ID NOs: 35, 76 and 147, respectively; or,
[0058] the protein functional region A comprises a light chain variable region and a heavy chain variable region, wherein the light chain variable region VL comprises LCDR1, LCDR2 and LCDR3 with amino acid sequences as set forth in SEQ ID NOs: 172, 192 and 216, respectively; and the heavy chain variable region VH comprises HCDR1, HCDR2 and HCDR3 with amino acid sequences as set forth in SEQ ID NOs: 30, 68 and 128, respectively; and the protein functional region B comprises a heavy chain variable region, wherein the heavy chain variable region VH comprises HCDR1, HCDR2 and HCDR3 with amino acid sequences as set forth in SEQ ID NOs: 34, 78 and 148, respectively; or,
[0059] the protein functional region A comprises a light chain variable region and a heavy chain variable region, wherein the light chain variable region VL comprises LCDR1, LCDR2 and LCDR3 with amino acid sequences as set forth in SEQ ID NOs: 172, 192 and 216, respectively; and the heavy chain variable region VH comprises HCDR1, HCDR2 and HCDR3 with amino acid sequences as set forth in SEQ ID NOs: 30, 68 and 128, respectively; and the protein functional region B comprises a heavy chain variable region, wherein the heavy chain variable region VH comprises HCDR1, HCDR2 and HCDR3 with amino acid sequences as set forth in SEQ ID NOs: 35, 76 and 136, respectively; or,
[0060] the protein functional region A comprises a light chain variable region and a heavy chain variable region, wherein the light chain variable region VL comprises LCDR1, LCDR2 and LCDR3 with amino acid sequences as set forth in SEQ ID NOs: 172, 192 and 216, respectively; and the heavy chain variable region VH comprises HCDR1, HCDR2 and HCDR3 with amino acid sequences as set forth in SEQ ID NOs: 30, 68 and 128, respectively; and the protein functional region B comprises a heavy chain variable region, wherein the heavy chain variable region VH comprises HCDR1, HCDR2 and HCDR3 with amino acid sequences as set forth in SEQ ID NOs: 35, 90 and 146, respectively; or,
[0061] the protein functional region A comprises a light chain variable region and a heavy chain variable region, wherein the light chain variable region VL comprises LCDR1, LCDR2 and LCDR3 with amino acid sequences as set forth in SEQ ID NOs: 172, 192 and 216, respectively; and the heavy chain variable region VH comprises HCDR1, HCDR2 and HCDR3 with amino acid sequences as set forth in SEQ ID NOs: 30, 68 and 128, respectively; and the protein functional region B comprises a heavy chain variable region, wherein the heavy chain variable region VH comprises HCDR1, HCDR2 and HCDR3 with amino acid sequences as set forth in SEQ ID NOs: 34, 76 and 136, respectively; or,
[0062] the protein functional region A comprises a light chain variable region and a heavy chain variable region, wherein the light chain variable region VL comprises LCDR1, LCDR2 and LCDR3 with amino acid sequences as set forth in SEQ ID NOs: 172, 192 and 216, respectively; and the heavy chain variable region VH comprises HCDR1, HCDR2 and HCDR3 with amino acid sequences as set forth in SEQ ID NOs: 30, 68 and 128, respectively; and the protein functional region B comprises a heavy chain variable region, wherein the heavy chain variable region VH comprises HCDR1, HCDR2 and HCDR3 with amino acid sequences as set forth in SEQ ID NOs: 35, 76 and 146, respectively; or,
[0063] the protein functional region A comprises a light chain variable region and a heavy chain variable region, wherein the light chain variable region VL comprises LCDR1, LCDR2 and LCDR3 with amino acid sequences as set forth in SEQ ID NOs: 172, 192 and 216, respectively; and the heavy chain variable region VH comprises HCDR1, HCDR2 and HCDR3 with amino acid sequences as set forth in SEQ ID NOs: 30, 68 and 128, respectively; and the protein functional region B comprises a heavy chain variable region, wherein the heavy chain variable region VH comprises HCDR1, HCDR2 and HCDR3 with amino acid sequences as set forth in SEQ ID NOs: 34, 76 and 146, respectively; or,
[0064] the protein functional region A comprises a light chain variable region and a heavy chain variable region, wherein the light chain variable region VL comprises LCDR1, LCDR2 and LCDR3 with amino acid sequences as set forth in SEQ ID NOs: 172, 192 and 216, respectively; and the heavy chain variable region VH comprises HCDR1, HCDR2 and HCDR3 with amino acid sequences as set forth in SEQ ID NOs: 30, 68 and 128, respectively; and the protein functional region B comprises a heavy chain variable region, wherein the heavy chain variable region VH comprises HCDR1, HCDR2 and HCDR3 with amino acid sequences as set forth in SEQ ID NOs: 35, 90 and 148, respectively; or,
[0065] the protein functional region A comprises a light chain variable region and a heavy chain variable region, wherein the light chain variable region VL comprises LCDR1, LCDR2 and LCDR3 with amino acid sequences as set forth in SEQ ID NOs: 172, 192 and 216, respectively; and the heavy chain variable region VH comprises HCDR1, HCDR2 and HCDR3 with amino acid sequences as set forth in SEQ ID NOs: 30, 68 and 128, respectively; and the protein functional region B comprises a heavy chain variable region, wherein the heavy chain variable region VH comprises HCDR1, HCDR2 and HCDR3 with amino acid sequences as set forth in SEQ ID NOs: 35, 90 and 136, respectively; or,
[0066] the protein functional region A comprises a light chain variable region and a heavy chain variable region, wherein the light chain variable region VL comprises LCDR1, LCDR2 and LCDR3 with amino acid sequences as set forth in SEQ ID NOs: 172, 192 and 216, respectively; and the heavy chain variable region VH comprises HCDR1, HCDR2 and HCDR3 with amino acid sequences as set forth in SEQ ID NOs: 30, 68 and 128, respectively; and the protein functional region B comprises a heavy chain variable region, wherein the heavy chain variable region VH comprises HCDR1, HCDR2 and HCDR3 with amino acid sequences as set forth in SEQ ID NOs: 34, 78 and 146, respectively; or,
[0067] the protein functional region A comprises a light chain variable region and a heavy chain variable region, wherein the light chain variable region VL comprises LCDR1, LCDR2 and LCDR3 with amino acid sequences as set forth in SEQ ID NOs: 172, 192 and 216, respectively; and the heavy chain variable region VH comprises HCDR1, HCDR2 and HCDR3 with amino acid sequences as set forth in SEQ ID NOs: 30, 68 and 128, respectively; and the protein functional region B comprises a heavy chain variable region, wherein the heavy chain variable region VH comprises HCDR1, HCDR2 and HCDR3 with amino acid sequences as set forth in SEQ ID NOs: 35, 78 and 147, respectively; or,
[0068] the protein functional region A comprises a light chain variable region and a heavy chain variable region, wherein the light chain variable region VL comprises LCDR1, LCDR2 and LCDR3 with amino acid sequences as set forth in SEQ ID NOs: 172, 192 and 216, respectively; and the heavy chain variable region VH comprises HCDR1, HCDR2 and HCDR3 with amino acid sequences as set forth in SEQ ID NOs: 30, 68 and 128, respectively; and the protein functional region B comprises a heavy chain variable region, wherein the heavy chain variable region VH comprises HCDR1, HCDR2 and HCDR3 with amino acid sequences as set forth in SEQ ID NOs: 35, 90 and 147, respectively; or,
[0069] the protein functional region A comprises a light chain variable region and a heavy chain variable region, wherein the light chain variable region VL comprises LCDR1, LCDR2 and LCDR3 with amino acid sequences as set forth in SEQ ID NOs: 177, 191 and 221, respectively; and the heavy chain variable region VH comprises HCDR1, HCDR2 and HCDR3 with amino acid sequences as set forth in SEQ ID NOs: 15, 84 and 141, respectively; and the protein functional region B comprises a heavy chain variable region, wherein the heavy chain variable region VH comprises HCDR1, HCDR2 and HCDR3 with amino acid sequences as set forth in SEQ ID NOs: 26, 78 and 136, respectively; or,
[0070] the protein functional region A comprises a light chain variable region and a heavy chain variable region, wherein the light chain variable region VL comprises LCDR1, LCDR2 and LCDR3 with amino acid sequences as set forth in SEQ ID NOs: 178, 197 and 222, respectively; and the heavy chain variable region VH comprises HCDR1, HCDR2 and HCDR3 with amino acid sequences as set forth in SEQ ID NOs: 31, 85 and 142, respectively; and the protein functional region B comprises a heavy chain variable region, wherein the heavy chain variable region VH comprises HCDR1, HCDR2 and HCDR3 with amino acid sequences as set forth in SEQ ID NOs: 26, 78 and 136, respectively; or,
[0071] the protein functional region A comprises a light chain variable region and a heavy chain variable region, wherein the light chain variable region VL comprises LCDR1, LCDR2 and LCDR3 with amino acid sequences as set forth in SEQ ID NOs: 177, 191 and 223, respectively; and the heavy chain variable region VH comprises HCDR1, HCDR2 and HCDR3 with amino acid sequences as set forth in SEQ ID NOs: 31, 86 and 141, respectively; and the protein functional region B comprises a heavy chain variable region, wherein the heavy chain variable region VH comprises HCDR1, HCDR2 and HCDR3 with amino acid sequences as set forth in SEQ ID NOs: 26, 78 and 136, respectively; or,
[0072] the protein functional region A comprises a light chain variable region and a heavy chain variable region, wherein the light chain variable region VL comprises LCDR1, LCDR2 and LCDR3 with amino acid sequences as set forth in SEQ ID NOs: 179, 198 and 224, respectively; and the heavy chain variable region VH comprises HCDR1, HCDR2 and HCDR3 with amino acid sequences as set forth in SEQ ID NOs: 31, 85 and 142, respectively; and the protein functional region B comprises a heavy chain variable region, wherein the heavy chain variable region VH comprises HCDR1, HCDR2 and HCDR3 with amino acid sequences as set forth in SEQ ID NOs: 26, 78 and 136, respectively; or,
[0073] in some preferred embodiments, the binding protein comprises a protein functional region A, a protein functional region B and a protein functional region C, wherein: the protein functional region A comprises a light chain variable region and a heavy chain variable region, wherein the light chain variable region VL comprises LCDR1, LCDR2 and LCDR3 with amino acid sequences as set forth in SEQ ID NOs: 172, 192 and 216, respectively; and the heavy chain variable region VH comprises HCDR1, HCDR2 and HCDR3 with amino acid sequences as set forth in SEQ ID NOs: 30, 68 and 128, respectively; the protein functional region B comprises a heavy chain variable region, wherein the heavy chain variable region VH comprises HCDR1, HCDR2 and HCDR3 with amino acid sequences as set forth in SEQ ID NOs: 15, 75 and 133, respectively; and the protein functional region C comprises a heavy chain variable region, wherein the heavy chain variable region VH comprises HCDR1, HCDR2 and HCDR3 with amino acid sequences as set forth in SEQ ID NOs: 24, 76 and 134, respectively; or,
[0074] the protein functional region A comprises a light chain variable region and a heavy chain variable region, wherein the light chain variable region VL comprises LCDR1, LCDR2 and LCDR3 with amino acid sequences as set forth in SEQ ID NOs: 172, 192 and 216, respectively; and the heavy chain variable region VH comprises HCDR1, HCDR2 and HCDR3 with amino acid sequences as set forth in SEQ ID NOs: 30, 68 and 128, respectively; the protein functional region B comprises a heavy chain variable region, wherein the heavy chain variable region VH comprises HCDR1, HCDR2 and HCDR3 with amino acid sequences as set forth in SEQ ID NOs: 25, 77 and 135, respectively; and the protein functional region C comprises a heavy chain variable region, wherein the heavy chain variable region VH comprises HCDR1, HCDR2 and HCDR3 with amino acid sequences as set forth in SEQ ID NOs: 26, 78 and 136, respectively. The amino acid sequences of the listed CDRs are shown according to the Chothia scheme.

[0075] In some more preferred embodiments, the binding protein comprises a protein functional region A and a protein functional region B, wherein: the protein functional region A comprises a light chain variable region and a heavy chain variable region, wherein the light chain variable region VL comprises an amino acid sequence as set forth in SEQ ID NO: 282; and the heavy chain variable region VH comprises an amino acid sequence as set forth in SEQ ID NO: 240; and the protein functional region B comprises a heavy chain variable region, wherein the heavy chain variable region VH comprises an amino acid sequence as set forth in SEQ ID NO: 236; or,
[0076] the protein functional region A comprises a light chain variable region and a heavy chain variable region, wherein the light chain variable region VL comprises an amino acid sequence as set forth in SEQ ID NO: 282; and the heavy chain variable region VH comprises an amino acid sequence as set forth in SEQ ID NO: 233; and the protein functional region B comprises a heavy chain variable region, wherein the heavy chain variable region VH comprises an amino acid sequence as set forth in SEQ ID NO: 236; or,
[0077] the protein functional region A comprises a light chain variable region and a heavy chain variable region, wherein the light chain variable region VL comprises an amino acid sequence as set forth in SEQ ID NO: 286; and the heavy chain variable region VH comprises an amino acid sequence as set forth in SEQ ID NO: 238; and the protein functional region B comprises a heavy chain variable region, wherein the heavy chain variable region VH comprises an amino acid sequence as set forth in SEQ ID NO: 236; or,
[0078] the protein functional region A comprises a light chain variable region and a heavy chain variable region, wherein the light chain variable region VL comprises an amino acid sequence as set forth in SEQ ID NO: 293; and the heavy chain variable region VH comprises an amino acid sequence as set forth in SEQ ID NO: 247; and the protein functional region B comprises a heavy chain variable region, wherein the heavy chain variable region VH comprises an amino acid sequence as set forth in SEQ ID NO: 236; or,
[0079] the protein functional region A comprises a light chain variable region and a heavy chain variable region, wherein the light chain variable region VL comprises an amino acid sequence as set forth in SEQ ID NO: 282; and the heavy chain variable region VH comprises an amino acid sequence as set forth in SEQ ID NO: 240; and the protein functional region B comprises a heavy chain variable region, wherein the heavy chain variable region VH comprises an amino acid sequence as set forth in SEQ ID NO: 253; or,
[0080] the protein functional region A comprises a light chain variable region and a heavy chain variable region, wherein the light chain variable region VL comprises an amino acid sequence as set forth in SEQ ID NO: 282; and the heavy chain variable region VH comprises an amino acid sequence as set forth in SEQ ID NO: 240; and the protein functional region B comprises a heavy chain variable region, wherein the heavy chain variable region VH comprises an amino acid sequence as set forth in SEQ ID NO: 252; or,
[0081] the protein functional region A comprises a light chain variable region and a heavy chain variable region, wherein the light chain variable region VL comprises an amino acid sequence as set forth in SEQ ID NO: 282; and the heavy chain variable region VH comprises an amino acid sequence as set forth in SEQ ID NO: 240; and the protein functional region B comprises a heavy chain variable region, wherein the heavy chain variable region VH comprises an amino acid sequence as set forth in SEQ ID NO: 255; or,
[0082] the protein functional region A comprises a light chain variable region and a heavy chain variable region, wherein the light chain variable region VL comprises an amino acid sequence as set forth in SEQ ID NO: 298; and the heavy chain variable region VH comprises an amino acid sequence as set forth in SEQ ID NO: 261; and the protein functional region B comprises a heavy chain variable region, wherein the heavy chain variable region VH comprises an amino acid sequence as set forth in SEQ ID NO: 253; or,
[0083] the protein functional region A comprises a light chain variable region and a heavy chain variable region, wherein the light chain variable region VL comprises an amino acid sequence as set forth in SEQ ID NO: 298; and the heavy chain variable region VH comprises an amino acid sequence as set forth in SEQ ID NO: 261; and the protein functional region B comprises a heavy chain variable region, wherein the heavy chain variable region VH comprises an amino acid sequence as set forth in SEQ ID NO: 252; or,
[0084] the protein functional region A comprises a light chain variable region and a heavy chain variable region, wherein the light chain variable region VL comprises an amino acid sequence as set forth in SEQ ID NO: 298; and the heavy chain variable region VH comprises an amino acid sequence as set forth in SEQ ID NO: 261; and the protein functional region B comprises a heavy chain variable region, wherein the heavy chain variable region VH comprises an amino acid sequence as set forth in SEQ ID NO: 264; or,
[0085] the protein functional region A comprises a light chain variable region and a heavy chain variable region, wherein the light chain variable region VL comprises an amino acid sequence as set forth in SEQ ID NO: 299; and the heavy chain variable region VH comprises an amino acid sequence as set forth in SEQ ID NO: 262; and the protein functional region B comprises a heavy chain variable region, wherein the heavy chain variable region VH comprises an amino acid sequence as set forth in SEQ ID NO: 253; or,
[0086] the protein functional region A comprises a light chain variable region and a heavy chain variable region, wherein the light chain variable region VL comprises an amino acid sequence as set forth in SEQ ID NO: 299; and the heavy chain variable region VH comprises an amino acid sequence as set forth in SEQ ID NO: 262; and the protein functional region B comprises a heavy chain variable region, wherein the heavy chain variable region VH comprises an amino acid sequence as set forth in SEQ ID NO: 254; or,
[0087] the protein functional region A comprises a light chain variable region and a heavy chain variable region, wherein the light chain variable region VL comprises an amino acid sequence as set forth in SEQ ID NO: 299; and the heavy chain variable region VH comprises an amino acid sequence as set forth in SEQ ID NO: 262; and the protein functional region B comprises a heavy chain variable region, wherein the heavy chain variable region VH comprises an amino acid sequence as set forth in SEQ ID NO: 256; or,
[0088] the protein functional region A comprises a light chain variable region and a heavy chain variable region, wherein the light chain variable region VL comprises an amino acid sequence as set forth in SEQ ID NO: 291; and the heavy chain variable region VH comprises an amino acid sequence as set forth in SEQ ID NO: 245; and the protein functional region B comprises a heavy chain variable region, wherein the heavy chain variable region VH comprises an amino acid sequence as set forth in SEQ ID NO: 249; or,
[0089] the protein functional region A comprises a light chain variable region and a heavy chain variable region, wherein the light chain variable region VL comprises an amino acid sequence as set forth in SEQ ID NO: 291; and the heavy chain variable region VH comprises an amino acid sequence as set forth in SEQ ID NO: 245; and the protein functional region B comprises a heavy chain variable region, wherein the heavy chain variable region VH comprises an amino acid sequence as set forth in SEQ ID NO: 251; or,
[0090] the protein functional region A comprises a light chain variable region and a heavy chain variable region, wherein the light chain variable region VL comprises an amino acid sequence as set forth in SEQ ID NO: 291; and the heavy chain variable region VH comprises an amino acid sequence as set forth in SEQ ID NO: 245; and the protein functional region B comprises a heavy chain variable region, wherein the heavy chain variable region VH comprises an amino acid sequence as set forth in SEQ ID NO: 248; or,
[0091] the protein functional region A comprises a light chain variable region and a heavy chain variable region, wherein the light chain variable region VL comprises an amino acid sequence as set forth in SEQ ID NO: 291; and the heavy chain variable region VH comprises an amino acid sequence as set forth in SEQ ID NO: 257; and the protein functional region B comprises a heavy chain variable region, wherein the heavy chain variable region VH comprises an amino acid sequence as set forth in SEQ ID NO: 248; or,
[0092] the protein functional region A comprises a light chain variable region and a heavy chain variable region, wherein the light chain variable region VL comprises an amino acid sequence as set forth in SEQ ID NO: 291; and the heavy chain variable region VH comprises an amino acid sequence as set forth in SEQ ID NO: 257; and the protein functional region B comprises a heavy chain variable region, wherein the heavy chain variable region VH comprises an amino acid sequence as set forth in SEQ ID NO: 251; or,
[0093] the protein functional region A comprises a light chain variable region and a heavy chain variable region, wherein the light chain variable region VL comprises an amino acid sequence as set forth in SEQ ID NO: 291; and the heavy chain variable region VH comprises an amino acid sequence as set forth in SEQ ID NO: 281; and the protein functional region B comprises a heavy chain variable region, wherein the heavy chain variable region VH comprises an amino acid sequence as set forth in SEQ ID NO: 251; or,
[0094] the protein functional region A comprises a light chain variable region and a heavy chain variable region, wherein the light chain variable region VL comprises an amino acid sequence as set forth in SEQ ID NO: 291; and the heavy chain variable region VH comprises an amino acid sequence as set forth in SEQ ID NO: 263; and the protein functional region B comprises a heavy chain variable region, wherein the heavy chain variable region VH comprises an amino acid sequence as set forth in SEQ ID NO: 251; or,
[0095] the protein functional region A comprises a light chain variable region and a heavy chain variable region, wherein the light chain variable region VL comprises an amino acid sequence as set forth in SEQ ID NO: 291; and the heavy chain variable region VH comprises an amino acid sequence as set forth in SEQ ID NO: 263; and the protein functional region B comprises a heavy chain variable region, wherein the heavy chain variable region VH comprises an amino acid sequence as set forth in SEQ ID NO: 265; or,
[0096] the protein functional region A comprises a light chain variable region and a heavy chain variable region, wherein the light chain variable region VL comprises an amino acid sequence as set forth in SEQ ID NO: 291; and the heavy chain variable region VH comprises an amino acid sequence as set forth in SEQ ID NO: 263; and the protein functional region B comprises a heavy chain variable region, wherein the heavy chain variable region VH comprises an amino acid sequence as set forth in SEQ ID NO: 269; or,
[0097] the protein functional region A comprises a light chain variable region and a heavy chain variable region, wherein the light chain variable region VL comprises an amino acid sequence as set forth in SEQ ID NO: 291; and the heavy chain variable region VH comprises an amino acid sequence as set forth in SEQ ID NO: 263; and the protein functional region B comprises a heavy chain variable region, wherein the heavy chain variable region VH comprises an amino acid sequence as set forth in SEQ ID NO: 270; or,
[0098] the protein functional region A comprises a light chain variable region and a heavy chain variable region, wherein the light chain variable region VL comprises an amino acid sequence as set forth in SEQ ID NO: 291; and the heavy chain variable region VH comprises an amino acid sequence as set forth in SEQ ID NO: 263; and the protein functional region B comprises a heavy chain variable region, wherein the heavy chain variable region VH comprises an amino acid sequence as set forth in SEQ ID NO: 271; or,
[0099] the protein functional region A comprises a light chain variable region and a heavy chain variable region, wherein the light chain variable region VL comprises an amino acid sequence as set forth in SEQ ID NO: 291; and the heavy chain variable region VH comprises an amino acid sequence as set forth in SEQ ID NO: 263; and the protein functional region B comprises a heavy chain variable region, wherein the heavy chain variable region VH comprises an amino acid sequence as set forth in SEQ ID NO: 272; or,
[0100] the protein functional region A comprises a light chain variable region and a heavy chain variable region, wherein the light chain variable region VL comprises an amino acid sequence as set forth in SEQ ID NO: 291; and the heavy chain variable region VH comprises an amino acid sequence as set forth in SEQ ID NO: 263; and the protein functional region B comprises a heavy chain variable region, wherein the heavy chain variable region VH comprises an amino acid sequence as set forth in SEQ ID NO: 273; or,
[0101] the protein functional region A comprises a light chain variable region and a heavy chain variable region, wherein the light chain variable region VL comprises an amino acid sequence as set forth in SEQ ID NO: 291; and the heavy chain variable region VH comprises an amino acid sequence as set forth in SEQ ID NO: 263; and the protein functional region B comprises a heavy chain variable region, wherein the heavy chain variable region VH comprises an amino acid sequence as set forth in SEQ ID NO: 274; or,
[0102] the protein functional region A comprises a light chain variable region and a heavy chain variable region, wherein the light chain variable region VL comprises an amino acid sequence as set forth in SEQ ID NO: 291; and the heavy chain variable region VH comprises an amino acid sequence as set forth in SEQ ID NO: 263; and the protein functional region B comprises a heavy chain variable region, wherein the heavy chain variable region VH comprises an amino acid sequence as set forth in SEQ ID NO: 275; or,
[0103] the protein functional region A comprises a light chain variable region and a heavy chain variable region, wherein the light chain variable region VL comprises an amino acid sequence as set forth in SEQ ID NO: 291; and the heavy chain variable region VH comprises an amino acid sequence as set forth in SEQ ID NO: 263; and the protein functional region B comprises a heavy chain variable region, wherein the heavy chain variable region VH comprises an amino acid sequence as set forth in SEQ ID NO: 276; or,
[0104] the protein functional region A comprises a light chain variable region and a heavy chain variable region, wherein the light chain variable region VL comprises an amino acid sequence as set forth in SEQ ID NO: 291; and the heavy chain variable region VH comprises an amino acid sequence as set forth in SEQ ID NO: 263; and the protein functional region B comprises a heavy chain variable region, wherein the heavy chain variable region VH comprises an amino acid sequence as set forth in SEQ ID NO: 277; or,
[0105] the protein functional region A comprises a light chain variable region and a heavy chain variable region, wherein the light chain variable region VL comprises an amino acid sequence as set forth in SEQ ID NO: 291; and the heavy chain variable region VH comprises an amino acid sequence as set forth in SEQ ID NO: 263; and the protein functional region B comprises a heavy chain variable region, wherein the heavy chain variable region VH comprises an amino acid sequence as set forth in SEQ ID NO: 278; or,
[0106] the protein functional region A comprises a light chain variable region and a heavy chain variable region, wherein the light chain variable region VL comprises an amino acid sequence as set forth in SEQ ID NO: 291; and the heavy chain variable region VH comprises an amino acid sequence as set forth in SEQ ID NO: 263; and the protein functional region B comprises a heavy chain variable region, wherein the heavy chain variable region VH comprises an amino acid sequence as set forth in SEQ ID NO: 279; or,
[0107] the protein functional region A comprises a light chain variable region and a heavy chain variable region, wherein the light chain variable region VL comprises an amino acid sequence as set forth in SEQ ID NO: 291; and the heavy chain variable region VH comprises an amino acid sequence as set forth in SEQ ID NO: 263; and the protein functional region B comprises a heavy chain variable region, wherein the heavy chain variable region VH comprises an amino acid sequence as set forth in SEQ ID NO: 280; or,
[0108] the protein functional region A comprises a light chain variable region and a heavy chain variable region, wherein the light chain variable region VL comprises an amino acid sequence as set forth in SEQ ID NO: 291; and the heavy chain variable region VH comprises an amino acid sequence as set forth in SEQ ID NO: 263; and the protein functional region B comprises a heavy chain variable region, wherein the heavy chain variable region VH comprises an amino acid sequence as set forth in SEQ ID NO: 266; or,
[0109] the protein functional region A comprises a light chain variable region and a heavy chain variable region, wherein the light chain variable region VL comprises an amino acid sequence as set forth in SEQ ID NO: 291; and the heavy chain variable region VH comprises an amino acid sequence as set forth in SEQ ID NO: 263; and the protein functional region B comprises a heavy chain variable region, wherein the heavy chain variable region VH comprises an amino acid sequence as set forth in SEQ ID NO: 267; or,
[0110] the protein functional region A comprises a light chain variable region and a heavy chain variable region, wherein the light chain variable region VL comprises an amino acid sequence as set forth in SEQ ID NO: 291; and the heavy chain variable region VH comprises an amino acid sequence as set forth in SEQ ID NO: 263; and the protein functional region B comprises a heavy chain variable region, wherein the heavy chain variable region VH comprises an amino acid sequence as set forth in SEQ ID NO: 268; or,
[0111] the protein functional region A comprises a light chain variable region and a heavy chain variable region, wherein the light chain variable region VL comprises an amino acid sequence as set forth in SEQ ID NO: 291; and the heavy chain variable region VH comprises an amino acid sequence as set forth in SEQ ID NO: 244; and the protein functional region B comprises a heavy chain variable region, wherein the heavy chain variable region VH comprises an amino acid sequence as set forth in SEQ ID NO: 249; or,
[0112] the protein functional region A comprises a light chain variable region and a heavy chain variable region, wherein the light chain variable region VL comprises an amino acid sequence as set forth in SEQ ID NO: 291; and the heavy chain variable region VH comprises an amino acid sequence as set forth in SEQ ID NO: 244; and the protein functional region B comprises a heavy chain variable region, wherein the heavy chain variable region VH comprises an amino acid sequence as set forth in SEQ ID NO: 251; or,
[0113] the protein functional region A comprises a light chain variable region and a heavy chain variable region, wherein the light chain variable region VL comprises an amino acid sequence as set forth in SEQ ID NO: 294; and the heavy chain variable region VH comprises an amino acid sequence as set forth in SEQ ID NO: 258; and the protein functional region B comprises a heavy chain variable region, wherein the heavy chain variable region VH comprises an amino acid sequence as set forth in SEQ ID NO: 251; or,
[0114] the protein functional region A comprises a light chain variable region and a heavy chain variable region, wherein the light chain variable region VL comprises an amino acid sequence as set forth in SEQ ID NO: 295; and the heavy chain variable region VH comprises an amino acid sequence as set forth in SEQ ID NO: 259; and the protein functional region B comprises a heavy chain variable region, wherein the heavy chain variable region VH comprises an amino acid sequence as set forth in SEQ ID NO: 251; or,
[0115] the protein functional region A comprises a light chain variable region and a heavy chain variable region, wherein the light chain variable region VL comprises an amino acid sequence as set forth in SEQ ID NO: 296; and the heavy chain variable region VH comprises an amino acid sequence as set forth in SEQ ID NO: 260; and the protein functional region B comprises a heavy chain variable region, wherein the heavy chain variable region VH comprises an amino acid sequence as set forth in SEQ ID NO: 251; or,
[0116] the protein functional region A comprises a light chain variable region and a heavy chain variable region, wherein the light chain variable region VL comprises an amino acid sequence as set forth in SEQ ID NO: 297; and the heavy chain variable region VH comprises an amino acid sequence as set forth in SEQ ID NO: 259; and the protein functional region B comprises a heavy chain variable region, wherein the heavy chain variable region VH comprises an amino acid sequence as set forth in SEQ ID NO: 251; or, in some more preferred embodiments, the binding protein comprises a protein functional region A, a protein functional region B and a protein functional region C, wherein the protein functional region A comprises a light chain variable region and a heavy chain variable region, wherein the light chain variable region VL comprises an amino acid sequence as set forth in SEQ ID NO: 291; and the heavy chain variable region VH comprises an amino acid sequence as set forth in SEQ ID NO: 257; and the protein functional region B comprises a heavy chain variable region, wherein the heavy chain variable region VH comprises an amino acid sequence as set forth in SEQ ID NO: 248. The protein functional region C comprises a heavy chain variable region, wherein the heavy chain variable region VH comprises an amino acid sequence as set forth in SEQ ID NO: 249; or,
[0117] the protein functional region A comprises a light chain variable region and a heavy chain variable region, wherein the light chain variable region VL comprises an amino acid sequence as set forth in SEQ ID NO: 291; and the heavy chain variable region VH comprises an amino acid sequence as set forth in SEQ ID NO: 257; the protein functional region B comprises a heavy chain variable region, wherein the heavy chain variable region VH comprises an amino acid sequence as set forth in SEQ ID NO: 250; and the protein functional region C comprises a heavy chain variable region, wherein the heavy chain variable region VH comprises an amino acid sequence as set forth in SEQ ID NO: 251.

[0118] In some more preferred embodiments, the binding protein comprises two polypeptide chains, wherein a first polypeptide chain comprises an amino acid sequence as set forth in SEQ ID NO: 371; and a second polypeptide chain comprises an amino acid sequence as set forth in SEQ ID NO: 372; or,
[0119] a first polypeptide chain comprises an amino acid sequence as set forth in SEQ ID NO: 371; and a second polypeptide chain comprises an amino acid sequence as set forth in SEQ ID NO: 373; or,
[0120] a first polypeptide chain comprises an amino acid sequence as set forth in SEQ ID NO: 353; and a second polypeptide chain comprises an amino acid sequence as set forth in SEQ ID NO: 362; or,
[0121] a first polypeptide chain comprises an amino acid sequence as set forth in SEQ ID NO: 363; and a second polypeptide chain comprises an amino acid sequence as set forth in SEQ ID NO: 364; or,
[0122] a first polypeptide chain comprises an amino acid sequence as set forth in SEQ ID NO: 365; and a second polypeptide chain comprises an amino acid sequence as set forth in SEQ ID NO: 364; or,
[0123] a first polypeptide chain comprises an amino acid sequence as set forth in SEQ ID NO: 353; and a second polypeptide chain comprises an amino acid sequence as set forth in SEQ ID NO: 366; or,
[0124] a first polypeptide chain comprises an amino acid sequence as set forth in SEQ ID NO: 353; and a second polypeptide chain comprises an amino acid sequence as set forth in SEQ ID NO: 369; or,
[0125] a first polypeptide chain comprises an amino acid sequence as set forth in SEQ ID NO: 353; and a second polypeptide chain comprises an amino acid sequence as set forth in SEQ ID NO: 370; or,
[0126] a first polypeptide chain comprises an amino acid sequence as set forth in SEQ ID NO: 353; and a second polypeptide chain comprises an amino acid sequence as set forth in SEQ ID NO: 394; or,
[0127] a first polypeptide chain comprises an amino acid sequence as set forth in SEQ ID NO: 353; and a second polypeptide chain comprises an amino acid sequence as set forth in SEQ ID NO: 395; or,
[0128] a first polypeptide chain comprises an amino acid sequence as set forth in SEQ ID NO: 363; and a second polypeptide chain comprises an amino acid sequence as set forth in SEQ ID NO: 310; or,
[0129] a first polypeptide chain comprises an amino acid sequence as set forth in SEQ ID NO: 363; and a second polypeptide chain comprises an amino acid sequence as set forth in SEQ ID NO: 396; or,
[0130] a first polypeptide chain comprises an amino acid sequence as set forth in SEQ ID NO: 363; and a second polypeptide chain comprises an amino acid sequence as set forth in SEQ ID NO: 362; or,
[0131] a first polypeptide chain comprises an amino acid sequence as set forth in SEQ ID NO: 363; and a second polypeptide chain comprises an amino acid sequence as set forth in SEQ ID NO: 394; or,
[0132] a first polypeptide chain comprises an amino acid sequence as set forth in SEQ ID NO: 363; and a second polypeptide chain comprises an amino acid sequence as set forth in SEQ ID NO: 395; or,
[0133] a first polypeptide chain comprises an amino acid sequence as set forth in SEQ ID NO: 367; and a second polypeptide chain comprises an amino acid sequence as set forth in SEQ ID NO: 368; or,
[0134] a first polypeptide chain comprises an amino acid sequence as set forth in SEQ ID NO: 367; and a second polypeptide chain comprises an amino acid sequence as set forth in SEQ ID NO: 378; or,
[0135] a first polypeptide chain comprises an amino acid sequence as set forth in SEQ ID NO: 367; and a second polypeptide chain comprises an amino acid sequence as set forth in SEQ ID NO: 379; or,
[0136] a first polypeptide chain comprises an amino acid sequence as set forth in SEQ ID NO: 367; and a second polypeptide chain comprises an amino acid sequence as set forth in SEQ ID NO: 380; or,
[0137] a first polypeptide chain comprises an amino acid sequence as set forth in SEQ ID NO: 367; and a second polypeptide chain comprises an amino acid sequence as set forth in SEQ ID NO: 381; or,
[0138] a first polypeptide chain comprises an amino acid sequence as set forth in SEQ ID NO: 367; and a second polypeptide chain comprises an amino acid sequence as set forth in SEQ ID NO: 382; or,
[0139] a first polypeptide chain comprises an amino acid sequence as set forth in SEQ ID NO: 367; and a second polypeptide chain comprises an amino acid sequence as set forth in SEQ ID NO: 383; or,
[0140] a first polypeptide chain comprises an amino acid sequence as set forth in SEQ ID NO: 367; and a second polypeptide chain comprises an amino acid sequence as set forth in SEQ ID NO: 385; or,
[0141] a first polypeptide chain comprises an amino acid sequence as set forth in SEQ ID NO: 367; and a second polypeptide chain comprises an amino acid sequence as set forth in SEQ ID NO: 388; or,
[0142] a first polypeptide chain comprises an amino acid sequence as set forth in SEQ ID NO: 367; and a second polypeptide chain comprises an amino acid sequence as set forth in SEQ ID NO: 389; or,
[0143] a first polypeptide chain comprises an amino acid sequence as set forth in SEQ ID NO: 351; and a second polypeptide chain comprises an amino acid sequence as set forth in SEQ ID NO: 374; or,
[0144] a first polypeptide chain comprises an amino acid sequence as set forth in SEQ ID NO: 351; and a second polypeptide chain comprises an amino acid sequence as set forth in SEQ ID NO: 375; or,
[0145] a first polypeptide chain comprises an amino acid sequence as set forth in SEQ ID NO: 351; and a second polypeptide chain comprises an amino acid sequence as set forth in SEQ ID NO: 386; or,
[0146] a first polypeptide chain comprises an amino acid sequence as set forth in SEQ ID NO: 351; and a second polypeptide chain comprises an amino acid sequence as set forth in SEQ ID NO: 387; or,
[0147] a first polypeptide chain comprises an amino acid sequence as set forth in SEQ ID NO: 351; and a second polypeptide chain comprises an amino acid sequence as set forth in SEQ ID NO: 401; or,
[0148] a first polypeptide chain comprises an amino acid sequence as set forth in SEQ ID NO: 402; and a second polypeptide chain comprises an amino acid sequence as set forth in SEQ ID NO: 305; or,
[0149] a first polypeptide chain comprises an amino acid sequence as set forth in SEQ ID NO: 351; and a second polypeptide chain comprises an amino acid sequence as set forth in SEQ ID NO: 403; or,
[0150] a first polypeptide chain comprises an amino acid sequence as set forth in SEQ ID NO: 402; and a second polypeptide chain comprises an amino acid sequence as set forth in SEQ ID NO: 409; or,
[0151] a first polypeptide chain comprises an amino acid sequence as set forth in SEQ ID NO: 359; and a second polypeptide chain comprises an amino acid sequence as set forth in SEQ ID NO: 404; or,
[0152] a first polypeptide chain comprises an amino acid sequence as set forth in SEQ ID NO: 405; and a second polypeptide chain comprises an amino acid sequence as set forth in SEQ ID NO: 315; or,
[0153] a first polypeptide chain comprises an amino acid sequence as set forth in SEQ ID NO: 359; and a second polypeptide chain comprises an amino acid sequence as set forth in SEQ ID NO: 406; or,
[0154] a first polypeptide chain comprises an amino acid sequence as set forth in SEQ ID NO: 351; and a second polypeptide chain comprises an amino acid sequence as set forth in SEQ ID NO: 376; or,
[0155] a first polypeptide chain comprises an amino acid sequence as set forth in SEQ ID NO: 351; and a second polypeptide chain comprises an amino acid sequence as set forth in SEQ ID NO: 377; or,
[0156] a first polypeptide chain comprises an amino acid sequence as set forth in SEQ ID NO: 351; and a second polypeptide chain comprises an amino acid sequence as set forth in SEQ ID NO: 397; or,
[0157] a first polypeptide chain comprises an amino acid sequence as set forth in SEQ ID NO: 351; and a second polypeptide chain comprises an amino acid sequence as set forth in SEQ ID NO: 398; or,
[0158] a first polypeptide chain comprises an amino acid sequence as set forth in SEQ ID NO: 351; and a second polypeptide chain comprises an amino acid sequence as set forth in SEQ ID NO: 399; or,
[0159] a first polypeptide chain comprises an amino acid sequence as set forth in SEQ ID NO: 351; and a second polypeptide chain comprises an amino acid sequence as set forth in SEQ ID NO: 400; or,
[0160] a first polypeptide chain comprises an amino acid sequence as set forth in SEQ ID NO: 402; and a second polypeptide chain comprises an amino acid sequence as set forth in SEQ ID NO: 401; or,
[0161] a first polypeptide chain comprises an amino acid sequence as set forth in SEQ ID NO: 402; and a second polypeptide chain comprises an amino acid sequence as set forth in SEQ ID NO: 403; or,
[0162] a first polypeptide chain comprises an amino acid sequence as set forth in SEQ ID NO: 405; and a second polypeptide chain comprises an amino acid sequence as set forth in SEQ ID NO: 404; or,
[0163] a first polypeptide chain comprises an amino acid sequence as set forth in SEQ ID NO: 405; and a second polypeptide chain comprises an amino acid sequence as set forth in SEQ ID NO: 406; or,
[0164] a first polypeptide chain comprises an amino acid sequence as set forth in SEQ ID NO: 371; and a second polypeptide chain comprises an amino acid sequence as set forth in SEQ ID NO: 486; or,
[0165] a first polypeptide chain comprises an amino acid sequence as set forth in SEQ ID NO: 353; and a second polypeptide chain comprises an amino acid sequence as set forth in SEQ ID NO: 460; or,
[0166] a first polypeptide chain comprises an amino acid sequence as set forth in SEQ ID NO: 353; and a second polypeptide chain comprises an amino acid sequence as set forth in SEQ ID NO: 461; or,
[0167] a first polypeptide chain comprises an amino acid sequence as set forth in SEQ ID NO: 353; and a second polypeptide chain comprises an amino acid sequence as set forth in SEQ ID NO: 462; or,
[0168] a first polypeptide chain comprises an amino acid sequence as set forth in SEQ ID NO: 487; and a second polypeptide chain comprises an amino acid sequence as set forth in SEQ ID NO: 488; or,
[0169] a first polypeptide chain comprises an amino acid sequence as set forth in SEQ ID NO: 360; and a second polypeptide chain comprises an amino acid sequence as set forth in SEQ ID NO: 455; or,
[0170] a first polypeptide chain comprises an amino acid sequence as set forth in SEQ ID NO: 360; and a second polypeptide chain comprises an amino acid sequence as set forth in SEQ ID NO: 456; or,
[0171] a first polypeptide chain comprises an amino acid sequence as set forth in SEQ ID NO: 360; and a second polypeptide chain comprises an amino acid sequence as set forth in SEQ ID NO: 457; or,
[0172] a first polypeptide chain comprises an amino acid sequence as set forth in SEQ ID NO: 360; and a second polypeptide chain comprises an amino acid sequence as set forth in SEQ ID NO: 458; or,
[0173] a first polypeptide chain comprises an amino acid sequence as set forth in SEQ ID NO: 360; and a second polypeptide chain comprises an amino acid sequence as set forth in SEQ ID NO: 459; or,
[0174] a first polypeptide chain comprises an amino acid sequence as set forth in SEQ ID NO: 419; and a second polypeptide chain comprises an amino acid sequence as set forth in SEQ ID NO: 412; or,
[0175] a first polypeptide chain comprises an amino acid sequence as set forth in SEQ ID NO: 419; and a second polypeptide chain comprises an amino acid sequence as set forth in SEQ ID NO: 414; or,
[0176] a first polypeptide chain comprises an amino acid sequence as set forth in SEQ ID NO: 440; and a second polypeptide chain comprises an amino acid sequence as set forth in SEQ ID NO: 428; or,
[0177] a first polypeptide chain comprises an amino acid sequence as set forth in SEQ ID NO: 441; and a second polypeptide chain comprises an amino acid sequence as set forth in SEQ ID NO: 428; or,
[0178] a first polypeptide chain comprises an amino acid sequence as set forth in SEQ ID NO: 442; and a second polypeptide chain comprises an amino acid sequence as set forth in SEQ ID NO: 428; or,
[0179] a first polypeptide chain comprises an amino acid sequence as set forth in SEQ ID NO: 443; and a second polypeptide chain comprises an amino acid sequence as set forth in SEQ ID NO: 428; or,
[0180] a first polypeptide chain comprises an amino acid sequence as set forth in SEQ ID NO: 487; and a second polypeptide chain comprises an amino acid sequence as set forth in SEQ ID NO: 520; or,
[0181] a first polypeptide chain comprises an amino acid sequence as set forth in SEQ ID NO: 353; and a second polypeptide chain comprises an amino acid sequence as set forth in SEQ ID NO: 521; or,
[0182] a first polypeptide chain comprises an amino acid sequence as set forth in SEQ ID NO: 371; and a second polypeptide chain comprises an amino acid sequence as set forth in SEQ ID NO: 522; or,
[0183] a first polypeptide chain comprises an amino acid sequence as set forth in SEQ ID NO: 360; and a second polypeptide chain comprises an amino acid sequence as set forth in SEQ ID NO: 523.

[0184] In some more preferred embodiments, the binding protein comprises three polypeptide chains, wherein a first polypeptide chain comprises an amino acid sequence as set forth in SEQ ID NO: 353; a second polypeptide chain comprises an amino acid sequence as set forth in SEQ ID NO: 407; and a third polypeptide chain comprises an amino acid sequence as set forth in SEQ ID NO: 390; or,
[0185] a first polypeptide chain comprises an amino acid sequence as set forth in SEQ ID NO: 353; a second polypeptide chain comprises an amino acid sequence as set forth in SEQ ID NO: 408; and a third polypeptide chain comprises an amino acid sequence as set forth in SEQ ID NO: 392; or,
[0186] a first polypeptide chain comprises an amino acid sequence as set forth in SEQ ID NO: 351; a second polypeptide chain comprises an amino acid sequence as set forth in SEQ ID NO: 391; and a third polypeptide chain comprises an amino acid sequence as set forth in SEQ ID NO: 390; or,
[0187] a first polypeptide chain comprises an amino acid sequence as set forth in SEQ ID NO: 351; a second polypeptide chain comprises an amino acid sequence as set forth in SEQ ID NO: 393; and a third polypeptide chain comprises an amino acid sequence as set forth in SEQ ID NO: 392; or,
[0188] a first polypeptide chain comprises an amino acid sequence as set forth in SEQ ID NO: 351; a second polypeptide chain comprises an amino acid sequence as set forth in SEQ ID NO: 391; and a third polypeptide chain comprises an amino acid sequence as set forth in SEQ ID NO: 434; or,
[0189] a first polypeptide chain comprises an amino acid sequence as set forth in SEQ ID NO: 351; a second polypeptide chain comprises an amino acid sequence as set forth in SEQ ID NO: 391; and a third polypeptide chain comprises an amino acid sequence as set forth in SEQ ID NO: 435; or,
[0190] a first polypeptide chain comprises an amino acid sequence as set forth in SEQ ID NO: 351; a second polypeptide chain comprises an amino acid sequence as set forth in SEQ ID NO: 393; and a third polypeptide chain comprises an amino acid sequence as set forth in SEQ ID NO: 436; or,
[0191] a first polypeptide chain comprises an amino acid sequence as set forth in SEQ ID NO: 351; a second polypeptide chain comprises an amino acid sequence as set forth in SEQ ID NO: 393; and a third polypeptide chain comprises an amino acid sequence as set forth in SEQ ID NO: 437; or,
[0192] a first polypeptide chain comprises an amino acid sequence as set forth in SEQ ID NO: 367; a second polypeptide chain comprises an amino acid sequence as set forth in SEQ ID NO: 438; and a third polypeptide chain comprises an amino acid sequence as set forth in SEQ ID NO: 434; or,
[0193] a first polypeptide chain comprises an amino acid sequence as set forth in SEQ ID NO: 367; a second polypeptide chain comprises an amino acid sequence as set forth in SEQ ID NO: 438; and a third polypeptide chain comprises an amino acid sequence as set forth in SEQ ID NO: 435; or,
[0194] a first polypeptide chain comprises an amino acid sequence as set forth in SEQ ID NO: 367; a second polypeptide chain comprises an amino acid sequence as set forth in SEQ ID NO: 439; and a third polypeptide chain comprises an amino acid sequence as set forth in SEQ ID NO: 436; or,
[0195] a first polypeptide chain comprises an amino acid sequence as set forth in SEQ ID NO: 367; a second polypeptide chain comprises an amino acid sequence as set forth in SEQ ID NO: 439; and a third polypeptide chain comprises an amino acid sequence as set forth in SEQ ID NO: 437; or,
[0196] a first polypeptide chain comprises an amino acid sequence as set forth in SEQ ID NO: 361; a second polypeptide chain comprises an amino acid sequence as set forth in SEQ ID NO: 481; and a third polypeptide chain comprises an amino acid sequence as set forth in SEQ ID NO: 482; or,
[0197] a first polypeptide chain comprises an amino acid sequence as set forth in SEQ ID NO: 361; a second polypeptide chain comprises an amino acid sequence as set forth in SEQ ID NO: 481; and a third polypeptide chain comprises an amino acid sequence as set forth in SEQ ID NO: 483; or,
[0198] a first polypeptide chain comprises an amino acid sequence as set forth in SEQ ID NO: 361; a second polypeptide chain comprises an amino acid sequence as set forth in SEQ ID NO: 481; and a third polypeptide chain comprises an amino acid sequence as set forth in SEQ ID NO: 484; or,
[0199] a first polypeptide chain comprises an amino acid sequence as set forth in SEQ ID NO: 361; a second polypeptide chain comprises an amino acid sequence as set forth in SEQ ID NO: 481; and a third polypeptide chain comprises an amino acid sequence as set forth in SEQ ID NO: 485; or,
[0200] a first polypeptide chain comprises an amino acid sequence as set forth in SEQ ID NO: 357; a second polypeptide chain comprises an amino acid sequence as set forth in SEQ ID NO: 411; and a third polypeptide chain comprises an amino acid sequence as set forth in SEQ ID NO: 412; or,
[0201] a first polypeptide chain comprises an amino acid sequence as set forth in SEQ ID NO: 357; a second polypeptide chain comprises an amino acid sequence as set forth in SEQ ID NO: 411; and a third polypeptide chain comprises an amino acid sequence as set forth in SEQ ID NO: 414; or,
[0202] a first polypeptide chain comprises an amino acid sequence as set forth in SEQ ID NO: 415; a second polypeptide chain comprises an amino acid sequence as set forth in SEQ ID NO: 416; and a third polypeptide chain comprises an amino acid sequence as set forth in SEQ ID NO: 410; or,
[0203] a first polypeptide chain comprises an amino acid sequence as set forth in SEQ ID NO: 415; a second polypeptide chain comprises an amino acid sequence as set forth in SEQ ID NO: 416; and a third polypeptide chain comprises an amino acid sequence as set forth in SEQ ID NO: 412; or,
[0204] a first polypeptide chain comprises an amino acid sequence as set forth in SEQ ID NO: 415; a second polypeptide chain comprises an amino acid sequence as set forth in SEQ ID NO: 416; and a third polypeptide chain comprises an amino acid sequence as set forth in SEQ ID NO: 414; or,
[0205] a first polypeptide chain comprises an amino acid sequence as set forth in SEQ ID NO: 417; a second polypeptide chain comprises an amino acid sequence as set forth in SEQ ID NO: 418; and a third polypeptide chain comprises an amino acid sequence as set forth in SEQ ID NO: 412; or,
[0206] a first polypeptide chain comprises an amino acid sequence as set forth in SEQ ID NO: 417; a second polypeptide chain comprises an amino acid sequence as set forth in SEQ ID NO: 418; and a third polypeptide chain comprises an amino acid sequence as set forth in SEQ ID NO: 414; or,
[0207] a first polypeptide chain comprises an amino acid sequence as set forth in SEQ ID NO: 357; a second polypeptide chain comprises an amino acid sequence as set forth in SEQ ID NO: 423; and a third polypeptide chain comprises an amino acid sequence as set forth in SEQ ID NO: 426; or,
[0208] a first polypeptide chain comprises an amino acid sequence as set forth in SEQ ID NO: 357; a second polypeptide chain comprises an amino acid sequence as set forth in SEQ ID NO: 423; and a third polypeptide chain comprises an amino acid sequence as set forth in SEQ ID NO: 427; or,
[0209] a first polypeptide chain comprises an amino acid sequence as set forth in SEQ ID NO: 357; a second polypeptide chain comprises an amino acid sequence as set forth in SEQ ID NO: 423; and a third polypeptide chain comprises an amino acid sequence as set forth in SEQ ID NO: 428; or,
[0210] a first polypeptide chain comprises an amino acid sequence as set forth in SEQ ID NO: 357; a second polypeptide chain comprises an amino acid sequence as set forth in SEQ ID NO: 423; and a third polypeptide chain comprises an amino acid sequence as set forth in SEQ ID NO: 429; or,
[0211] a first polypeptide chain comprises an amino acid sequence as set forth in SEQ ID NO: 357; a second polypeptide chain comprises an amino acid sequence as set forth in SEQ ID NO: 444; and a third polypeptide chain comprises an amino acid sequence as set forth in SEQ ID NO: 449; or,
[0212] a first polypeptide chain comprises an amino acid sequence as set forth in SEQ ID NO: 357; a second polypeptide chain comprises an amino acid sequence as set forth in SEQ ID NO: 450; and a third polypeptide chain comprises an amino acid sequence as set forth in SEQ ID NO: 449; or,
[0213] a first polypeptide chain comprises an amino acid sequence as set forth in SEQ ID NO: 357; a second polypeptide chain comprises an amino acid sequence as set forth in SEQ ID NO: 444; and a third polypeptide chain comprises an amino acid sequence as set forth in SEQ ID NO: 445; or,
[0214] a first polypeptide chain comprises an amino acid sequence as set forth in SEQ ID NO: 357; a second polypeptide chain comprises an amino acid sequence as set forth in SEQ ID NO: 444; and a third polypeptide chain comprises an amino acid sequence as set forth in SEQ ID NO: 446; or,
[0215] a first polypeptide chain comprises an amino acid sequence as set forth in SEQ ID NO: 357; a second polypeptide chain comprises an amino acid sequence as set forth in SEQ ID NO: 450; and a third polypeptide chain comprises an amino acid sequence as set forth in SEQ ID NO: 445; or,
[0216] a first polypeptide chain comprises an amino acid sequence as set forth in SEQ ID NO: 357; a second polypeptide chain comprises an amino acid sequence as set forth in SEQ ID NO: 450; and a third polypeptide chain comprises an amino acid sequence as set forth in SEQ ID NO: 446; or,
[0217] a first polypeptide chain comprises an amino acid sequence as set forth in SEQ ID NO: 357; a second polypeptide chain comprises an amino acid sequence as set forth in SEQ ID NO: 444; and a third polypeptide chain comprises an amino acid sequence as set forth in SEQ ID NO: 447; or,
[0218] a first polypeptide chain comprises an amino acid sequence as set forth in SEQ ID NO: 357; a second polypeptide chain comprises an amino acid sequence as set forth in SEQ ID NO: 444; and a third polypeptide chain comprises an amino acid sequence as set forth in SEQ ID NO: 448; or,
[0219] a first polypeptide chain comprises an amino acid sequence as set forth in SEQ ID NO: 357; a second polypeptide chain comprises an amino acid sequence as set forth in SEQ ID NO: 450; and a third polypeptide chain comprises an amino acid sequence as set forth in SEQ ID NO: 447; or,
[0220] a first polypeptide chain comprises an amino acid sequence as set forth in SEQ ID NO: 357; a second polypeptide chain comprises an amino acid sequence as set forth in SEQ ID NO: 450; and a third polypeptide chain comprises an amino acid sequence as set forth in SEQ ID NO: 448; or,
[0221] a first polypeptide chain comprises an amino acid sequence as set forth in SEQ ID NO: 357; a second polypeptide chain comprises an amino acid sequence as set forth in SEQ ID NO: 454; and a third polypeptide chain comprises an amino acid sequence as set forth in SEQ ID NO: 445; or,
[0222] a first polypeptide chain comprises an amino acid sequence as set forth in SEQ ID NO: 357; a second polypeptide chain comprises an amino acid sequence as set forth in SEQ ID NO: 454; and a third polypeptide chain comprises an amino acid sequence as set forth in SEQ ID NO: 446; or,
[0223] a first polypeptide chain comprises an amino acid sequence as set forth in SEQ ID NO: 357; a second polypeptide chain comprises an amino acid sequence as set forth in SEQ ID NO: 463; and a third polypeptide chain comprises an amino acid sequence as set forth in SEQ ID NO: 464; or,
[0224] a first polypeptide chain comprises an amino acid sequence as set forth in SEQ ID NO: 357; a second polypeptide chain comprises an amino acid sequence as set forth in SEQ ID NO: 454; and a third polypeptide chain comprises an amino acid sequence as set forth in SEQ ID NO: 465; or,
[0225] a first polypeptide chain comprises an amino acid sequence as set forth in SEQ ID NO: 357; a second polypeptide chain comprises an amino acid sequence as set forth in SEQ ID NO: 454; and a third polypeptide chain comprises an amino acid sequence as set forth in SEQ ID NO: 466; or,
[0226] a first polypeptide chain comprises an amino acid sequence as set forth in SEQ ID NO: 357; a second polypeptide chain comprises an amino acid sequence as set forth in SEQ ID NO: 454; and a third polypeptide chain comprises an amino acid sequence as set forth in SEQ ID NO: 467; or,
[0227] a first polypeptide chain comprises an amino acid sequence as set forth in SEQ ID NO: 357; a second polypeptide chain comprises an amino acid sequence as set forth in SEQ ID NO: 454; and a third polypeptide chain comprises an amino acid sequence as set forth in SEQ ID NO: 468; or,
[0228] a first polypeptide chain comprises an amino acid sequence as set forth in SEQ ID NO: 357; a second polypeptide chain comprises an amino acid sequence as set forth in SEQ ID NO: 454; and a third polypeptide chain comprises an amino acid sequence as set forth in SEQ ID NO: 469; or,
[0229] a first polypeptide chain comprises an amino acid sequence as set forth in SEQ ID NO: 357; a second polypeptide chain comprises an amino acid sequence as set forth in SEQ ID NO: 454; and a third polypeptide chain comprises an amino acid sequence as set forth in SEQ ID NO: 470; or,
[0230] a first polypeptide chain comprises an amino acid sequence as set forth in SEQ ID NO: 357; a second polypeptide chain comprises an amino acid sequence as set forth in SEQ ID NO: 454; and a third polypeptide chain comprises an amino acid sequence as set forth in SEQ ID NO: 471; or,
[0231] a first polypeptide chain comprises an amino acid sequence as set forth in SEQ ID NO: 357; a second polypeptide chain comprises an amino acid sequence as set forth in SEQ ID NO: 454; and a third polypeptide chain comprises an amino acid sequence as set forth in SEQ ID NO: 472; or,
[0232] a first polypeptide chain comprises an amino acid sequence as set forth in SEQ ID NO: 357; a second polypeptide chain comprises an amino acid sequence as set forth in SEQ ID NO: 454; and a third polypeptide chain comprises an amino acid sequence as set forth in SEQ ID NO: 473; or,
[0233] a first polypeptide chain comprises an amino acid sequence as set forth in SEQ ID NO: 357; a second polypeptide chain comprises an amino acid sequence as set forth in SEQ ID NO: 454; and a third polypeptide chain comprises an amino acid sequence as set forth in SEQ ID NO: 474; or,
[0234] a first polypeptide chain comprises an amino acid sequence as set forth in SEQ ID NO: 357; a second polypeptide chain comprises an amino acid sequence as set forth in SEQ ID NO: 454; and a third polypeptide chain comprises an amino acid sequence as set forth in SEQ ID NO: 475; or,
[0235] a first polypeptide chain comprises an amino acid sequence as set forth in SEQ ID NO: 357; a second polypeptide chain comprises an amino acid sequence as set forth in SEQ ID NO: 454; and a third polypeptide chain comprises an amino acid sequence as set forth in SEQ ID NO: 476; or,
[0236] a first polypeptide chain comprises an amino acid sequence as set forth in SEQ ID NO: 357; a second polypeptide chain comprises an amino acid sequence as set forth in SEQ ID NO: 454; and a third polypeptide chain comprises an amino acid sequence as set forth in SEQ ID NO: 477; or,
[0237] a first polypeptide chain comprises an amino acid sequence as set forth in SEQ ID NO: 357; a second polypeptide chain comprises an amino acid sequence as set forth in SEQ ID NO: 454; and a third polypeptide chain comprises an amino acid sequence as set forth in SEQ ID NO: 478; or,
[0238] a first polypeptide chain comprises an amino acid sequence as set forth in SEQ ID NO: 357; a second polypeptide chain comprises an amino acid sequence as set forth in SEQ ID NO: 454; and a third polypeptide chain comprises an amino acid sequence as set forth in SEQ ID NO: 479; or,
[0239] a first polypeptide chain comprises an amino acid sequence as set forth in SEQ ID NO: 357; a second polypeptide chain comprises an amino acid sequence as set forth in SEQ ID NO: 454; and a third polypeptide chain comprises an amino acid sequence as set forth in SEQ ID NO: 480; or,
[0240] a first polypeptide chain comprises an amino acid sequence as set forth in SEQ ID NO: 357; a second polypeptide chain comprises an amino acid sequence as set forth in SEQ ID NO: 423; and a third polypeptide chain comprises an amino acid sequence as set forth in SEQ ID NO: 430; or,
[0241] a first polypeptide chain comprises an amino acid sequence as set forth in SEQ ID NO: 357; a second polypeptide chain comprises an amino acid sequence as set forth in SEQ ID NO: 423; and a third polypeptide chain comprises an amino acid sequence as set forth in SEQ ID NO: 431; or,
[0242] a first polypeptide chain comprises an amino acid sequence as set forth in SEQ ID NO: 357; a second polypeptide chain comprises an amino acid sequence as set forth in SEQ ID NO: 423; and a third polypeptide chain comprises an amino acid sequence as set forth in SEQ ID NO: 432; or,
[0243] a first polypeptide chain comprises an amino acid sequence as set forth in SEQ ID NO: 357; a second polypeptide chain comprises an amino acid sequence as set forth in SEQ ID NO: 423; and a third polypeptide chain comprises an amino acid sequence as set forth in SEQ ID NO: 433.

[0244] In order to solve the above technical problems, a second technical solution of the present invention is as follows: provided is an isolated nucleic acid encoding the binding protein described above.

[0245] In order to solve the above technical problems, a third technical solution of the present invention is as follows: provided is an expression vector comprising the isolated nucleic acid described above.

[0246] In order to solve the above technical problems, a fourth technical solution of the present invention is as follows: provided is a host cell comprising the expression vector described above, wherein the host cell is a prokaryotic cell or a eukaryotic cell.

[0247] In order to solve the above technical problems, a fifth technical solution of the present invention is as follows: provided is a method for preparing the binding protein described above, which comprises the following steps: culturing the host cell described above, and obtaining the binding protein from a culture.

[0248] In order to solve the above technical problems, a sixth technical solution of the present invention is as follows: provided is a pharmaceutical composition comprising the binding protein described above.

[0249] In order to solve the above technical problems, a seventh technical solution of the present invention is as follows: provided is a combination of kits comprising a kit I and a kit I, wherein the kit I comprises the binding protein or the pharmaceutical composition described above, and the second kit comprises an additional antibody or pharmaceutical composition for treating cancer.

[0250] In order to solve the above technical problems, an eighth technical solution of the present invention is as follows: provided is use of the binding protein or the pharmaceutical composition described above in the preparation of a drug for treating and/or preventing cancer. The cancer is preferably breast cancer, ovarian cancer, endometrial cancer, renal cancer, melanoma, lung cancer, gastric cancer, liver cancer, esophageal cancer, cervical cancer, head and neck tumor, cholangiocarcinoma, gallbladder cancer, bladder cancer, sarcoma, colorectal cancer, lymphoma or multiple myeloma.

[0251] In order to solve the above technical problems, a ninth technical solution of the present invention is as follows: provided is a method for treating cancer, which comprises administering to a subject in need thereof the binding protein according to the first technical solution of the present invention, the pharmaceutical composition according to the sixth technical solution of the present invention or the combination of kits according to the seventh technical solution of the present invention; preferably, further comprises administering an additional antibody for treating cancer, such as an immune checkpoint antibody and/or a chemotherapeutic agent.

[0252] The cancer is preferably breast cancer, ovarian cancer, endometrial cancer, renal cancer, melanoma, lung cancer, gastric cancer, liver cancer, esophageal cancer, cervical cancer, head and neck tumor, cholangiocarcinoma, gallbladder cancer, bladder cancer, sarcoma, colorectal cancer, lymphoma or multiple myeloma.

[0253] In order to solve the above technical problems, a tenth technical solution of the present invention is as follows: provided is a CD3 antibody.

[0254] The CD3 antibody comprises a light chain variable region and a heavy chain variable region, wherein the light chain variable region VL comprises LCDR1, LCDR2 and LCDR3 with amino acid sequences as set forth in SEQ ID NOs: 177, 191 and 221, respectively; and the heavy chain variable region VH comprises HCDR1, HCDR2 and HCDR3 with amino acid sequences as set forth in SEQ ID NOs: 15, 84 and 141, respectively; or, the light chain variable region VL comprises LCDR1, LCDR2 and LCDR3 with amino acid sequences as set forth in SEQ ID NOs: 178, 197 and 222, respectively; and the heavy chain variable region VH comprises HCDR1, HCDR2 and HCDR3 with amino acid sequences as set forth in SEQ ID NOs: 31, 85 and 142, respectively; or, the light chain variable region VL comprises LCDR1, LCDR2 and LCDR3 with amino acid sequences as set forth in SEQ ID NOs: 177, 191 and 223, respectively; and the heavy chain variable region VH comprises HCDR1, HCDR2 and HCDR3 with amino acid sequences as set forth in SEQ ID NOs: 31, 86 and 141, respectively; or, the light chain variable region VL comprises LCDR1, LCDR2 and LCDR3 with amino acid sequences as set forth in SEQ ID NOs: 179, 198 and 224, respectively; and the heavy chain variable region VH comprises HCDR1, HCDR2 and HCDR3 with amino acid sequences as set forth in SEQ ID NOs: 31, 85 and 142, respectively. The amino acid sequences of the listed CDRs are shown according to the Chothia scheme. Preferably, the light chain variable region VL comprises an amino acid sequence as set forth in SEQ ID NO: 294; and the heavy chain variable region VH comprises an amino acid sequence as set forth in SEQ ID NO: 258; or, the light chain variable region VL comprises an amino acid sequence as set forth in SEQ ID NO: 295; and the heavy chain variable region VH comprises an amino acid sequence as set forth in SEQ ID NO: 259; or, the light chain variable region VL comprises an amino acid sequence as set forth in SEQ ID NO: 296; and the heavy chain variable region VH comprises an amino acid sequence as set forth in SEQ ID NO: 260; or, the light chain variable region VL comprises an amino acid sequence as set forth in SEQ ID NO: 297; and the heavy chain variable region VH comprises an amino acid sequence as set forth in SEQ ID NO: 259.

[0255] Alternatively, the CD3 antibody comprises a light chain variable region and a heavy chain variable region, wherein the light chain variable region VL comprises LCDR1, LCDR2 and LCDR3 with amino acid sequences as set forth in SEQ ID NOs: 172, 192 and 216, respectively; and the heavy chain variable region VH comprises HCDR1, HCDR2 and HCDR3 with amino acid sequences as set forth in SEQ ID NOs: 20, 68 and 128, respectively; or, the light chain variable region VL comprises LCDR1, LCDR2 and LCDR3 with amino acid sequences as set forth in SEQ ID NOs: 172, 192 and 216, respectively; and the heavy chain variable region VH comprises HCDR1, HCDR2 and HCDR3 with amino acid sequences as set forth in SEQ ID NOs: 30, 68 and 128, respectively. The amino acid sequences of the listed CDRs are shown according to the Chothia scheme. Preferably, the light chain variable region VL comprises an amino acid sequence as set forth in SEQ ID NO: 291; and the heavy chain variable region VH comprises an amino acid sequence as set forth in SEQ ID NO: 245; or, the light chain variable region VL comprises an amino acid sequence as set forth in SEQ ID NO: 291; and the heavy chain variable region VH comprises an amino acid sequence as set forth in SEQ ID NO: 257; or, the light chain variable region VL comprises an amino acid sequence as set forth in SEQ ID NO: 291; and the heavy chain variable region VH comprises an amino acid sequence as set forth in SEQ ID NO: 263; or, the light chain variable region VL comprises an amino acid sequence as set forth in SEQ ID NO: 291; and the heavy chain variable region VH comprises an amino acid sequence as set forth in SEQ ID NO: 281; or, the light chain variable region VL comprises an amino acid sequence as set forth in SEQ ID NO: 291; and the heavy chain variable region VH comprises an amino acid sequence as set forth in SEQ ID NO: 244.

[0256] In some specific embodiments, the CD3 antibody comprises two polypeptide chains, wherein a first polypeptide chain comprises an amino acid sequence as set forth in SEQ ID NO: 357, and a second polypeptide chain comprises an amino acid sequence as set forth in SEQ ID NO: 313; or, a first polypeptide chain comprises an amino acid sequence as set forth in SEQ ID NO: 357, and a second polypeptide chain comprises an amino acid sequence as set forth in SEQ ID NO: 325; or, a first polypeptide chain comprises an amino acid sequence as set forth in SEQ ID NO: 357, and a second polypeptide chain comprises an amino acid sequence as set forth in SEQ ID NO: 328; or, a first polypeptide chain comprises an amino acid sequence as set forth in SEQ ID NO: 357, and a second polypeptide chain comprises an amino acid sequence as set forth in SEQ ID NO: 346.

[0257] In some specific embodiments, the CD3 antibody comprises one polypeptide chain, wherein the polypeptide chain comprises an amino acid sequence as set forth in SEQ ID NO: 489, an amino acid sequence as set forth in SEQ ID NO: 490, an amino acid sequence as set forth in SEQ ID NO: 491, an amino acid sequence as set forth in SEQ ID NO: 492 or an amino acid sequence as set forth in SEQ ID NO: 493.

[0258] In order to solve the above technical problems, an eleventh technical solution of the present invention is as follows: provided is a BCMA antibody.

[0259] The BCMA antibody comprises a heavy chain variable region, wherein the heavy chain variable region VH comprises HCDR1, HCDR2 and HCDR3 with amino acid sequences as set forth in SEQ ID NOs: 15, 75 and 133, respectively; or, the heavy chain variable region VH comprises HCDR1, HCDR2 and HCDR3 with amino acid sequences as set forth in SEQ ID NOs: 24, 76 and 134, respectively; or, the heavy chain variable region VH comprises HCDR1, HCDR2 and HCDR3 with amino acid sequences as set forth in SEQ ID NOs: 25, 77 and 135, respectively; or, the heavy chain variable region VH comprises HCDR1, HCDR2 and HCDR3 with amino acid sequences as set forth in SEQ ID NOs: 26, 78 and 136, respectively. The amino acid sequences of the listed CDRs are shown according to the Chothia scheme. Preferably, the heavy chain variable region VH comprises an amino acid sequence as set forth in SEQ ID NO: 248; or, the heavy chain variable region VH comprises an amino acid sequence as set forth in SEQ ID NO: 249; or, the heavy chain variable region VH comprises an amino acid sequence as set forth in SEQ ID NO: 250; or, the heavy chain variable region VH comprises an amino acid sequence as set forth in SEQ ID NO: 251. More preferably, the BCMA antibody comprises one polypeptide chain, wherein the polypeptide chain comprises an amino acid sequence as set forth in SEQ ID NO: 316, an amino acid sequence as set forth in SEQ ID NO: 317, an amino acid sequence as set forth in SEQ ID NO: 318 or an amino acid sequence as set forth in SEQ ID NO: 319.

[0260] Alternatively, the BCMA antibody comprises a heavy chain variable region, wherein the heavy chain variable region VH comprises HCDR1, HCDR2, and HCDR3 with amino acid sequences as set forth in SEQ ID NOs: 26, 90 and 136, respectively; or, the heavy chain variable region VH comprises HCDR1, HCDR2 and HCDR3 with amino acid sequences as set forth in SEQ ID NOs: 34, 78 and 146, respectively; or, the heavy chain variable region VH comprises HCDR1, HCDR2 and HCDR3 with amino acid sequences as set forth in SEQ ID NOs: 35, 78 and 147, respectively; or, the heavy chain variable region VH comprises HCDR1, HCDR2 and HCDR3 with amino acid sequences as set forth in SEQ ID NOs: 35, 90 and 147, respectively; or, the heavy chain variable region VH comprises HCDR1, HCDR2 and HCDR3 with amino acid sequences as set forth in SEQ ID NOs: 36, 90 and 146, respectively; or, the heavy chain variable region VH comprises HCDR1, HCDR2 and HCDR3 with amino acid sequences as set forth in SEQ ID NOs: 35, 76 and 147, respectively; or, the heavy chain variable region VH comprises HCDR1, HCDR2 and HCDR3 with amino acid sequences as set forth in SEQ ID NOs: 34, 78 and 148, respectively; or, the heavy chain variable region VH comprises HCDR1, HCDR2 and HCDR3 with amino acid sequences as set forth in SEQ ID NOs: 35, 76 and 136, respectively; or, the heavy chain variable region VH comprises HCDR1, HCDR2 and HCDR3 with amino acid sequences as set forth in SEQ ID NOs: 35, 90 and 146, respectively; or, the heavy chain variable region VH comprises HCDR1, HCDR2 and HCDR3 with amino acid sequences as set forth in SEQ ID NOs: 34, 76 and 136, respectively; or, the heavy chain variable region VH comprises HCDR1, HCDR2 and HCDR3 with amino acid sequences as set forth in SEQ ID NOs: 35, 76 and 146, respectively; or, the heavy chain variable region VH comprises HCDR1, HCDR2 and HCDR3 with amino acid sequences as set forth in SEQ ID NOs: 34, 76 and 146, respectively; or, the heavy chain variable region VH comprises HCDR1, HCDR2 and HCDR3 with amino acid sequences as set forth in SEQ ID NOs: 35, 90 and 148, respectively; or, the heavy chain variable region VH comprises HCDR1, HCDR2 and HCDR3 with amino acid sequences as set forth in SEQ ID NOs: 35, 90 and 136, respectively. The amino acid sequences of the listed CDRs are shown according to the Chothia scheme.

[0261] In some specific embodiments, the heavy chain variable region VH comprises an amino acid sequence as set forth in SEQ ID NO: 265; or, the heavy chain variable region VH comprises an amino acid sequence as set forth in SEQ ID NO: 266; or, the heavy chain variable region VH comprises an amino acid sequence as set forth in SEQ ID NO: 267; or, the heavy chain variable region VH comprises an amino acid sequence as set forth in SEQ ID NO: 268; or, the heavy chain variable region VH comprises an amino acid sequence as set forth in SEQ ID NO: 269; or, the heavy chain variable region VH comprises an amino acid sequence as set forth in SEQ ID NO: 270; or, the heavy chain variable region VH comprises an amino acid sequence as set forth in SEQ ID NO: 271; or, the heavy chain variable region VH comprises an amino acid sequence as set forth in SEQ ID NO: 272; or, the heavy chain variable region VH comprises an amino acid sequence as set forth in SEQ ID NO: 273; or, the heavy chain variable region VH comprises an amino acid sequence as set forth in SEQ ID NO: 274; or, the heavy chain variable region VH comprises an amino acid sequence as set forth in SEQ ID NO: 275; or, the heavy chain variable region VH comprises an amino acid sequence as set forth in SEQ ID NO: 276; or, the heavy chain variable region VH comprises an amino acid sequence as set forth in SEQ ID NO: 277; or, the heavy chain variable region VH comprises an amino acid sequence as set forth in SEQ ID NO: 278; or, the heavy chain variable region VH comprises an amino acid sequence as set forth in SEQ ID NO: 279; or, the heavy chain variable region VH comprises an amino acid sequence as set forth in SEQ ID NO: 280.

[0262] In some specific embodiments, the BCMA antibody comprises one polypeptide chain, wherein the polypeptide chain comprises an amino acid sequence as set forth in SEQ ID NO: 330; or, an amino acid sequence as set forth in SEQ ID NO: 331; or, an amino acid sequence as set forth in SEQ ID NO: 332; or, an amino acid sequence as set forth in SEQ ID NO: 333; or, an amino acid sequence as set forth in SEQ ID NO: 334; or, an amino acid sequence as set forth in SEQ ID NO: 335; or, an amino acid sequence as set forth in SEQ ID NO: 336; or, an amino acid sequence as set forth in SEQ ID NO: 337; or, an amino acid sequence as set forth in SEQ ID NO: 338; or, an amino acid sequence as set forth in SEQ ID NO: 339; or, an amino acid sequence as set forth in SEQ ID NO: 340; or, an amino acid sequence as set forth in SEQ ID NO: 341; or, an amino acid sequence as set forth in SEQ ID NO: 342; or, an amino acid sequence as set forth in SEQ ID NO: 343; or, an amino acid sequence as set forth in SEQ ID NO: 344; or, an amino acid sequence as set forth in SEQ ID NO: 345.

[0263] The beneficial effects of the present invention are as follows:

[0264] The present invention provides bivalent to multivalent and bispecific or multispecific binding proteins constructed using fully human heavy-chain antibodies and single-domain antibodies derived therefrom, as well as a method for preparing and using the binding proteins. Compared with the bivalent to multivalent and bispecific or multispecific binding proteins constructed using conventional IgG antibodies, such binding proteins have many advantages and is more flexible in terms of adjusting specificity and binding valence, so that multispecific binding proteins with smaller molecular weight, less polypeptide chains and simpler structure can be constructed, and different biological functions can be achieved through different structures.

[0265] In some specific embodiments, by regulating the functional activity of different targets through different structure types, relative positions, binding valence and other parameters, different activity combinations were designed to meet the requirements of dose combinations of combination drugs in the clinic. In some specific embodiments, the VH domains of heavy-chain antibodies can be conveniently connected in tandem to form multivalent structures, which can facilitate crosslinking of the targets by multivalent binding to the targets, and further enhance biological functions induced by crosslinking of the targets. In some specific embodiments, asymmetric tetravalent structures such as “1+3” may be achieved using the VH domains of heavy-chain antibodies, while similar structures are difficult to achieve using conventional IgG antibody-derived structures.

### BRIEF DESCRIPTION OF THE DRAWINGS

[0266] FIG. 1 shows the schematic diagrams of molecular structures.

[0267] FIG. 2 shows the binding activity of PD-L1×CTLA4 bispecific antibody molecules to an hCTLA4-His protein.

[0268] FIG. 3 shows the binding activity of PD-L1×CTLA4 bispecific antibody molecules to CHO-K1/hCTLA4 cells.

[0269] FIG. 4 shows the binding activity of PD-L1×CTLA4 bispecific antibody molecules to HEK293/hCTLA4 cells.

[0270] FIG. 5 shows the activity of PD-L1×CTLA4 bispecific antibody molecules blocking the binding of human CTLA4 proteins to its ligand protein B7-1.

[0271] FIG. 6 shows the activity of PD-L1×CTLA4 bispecific antibody molecules blocking the binding of CHO-K1/hCTLA4 cells to its ligand protein B7-1.

[0272] FIG. 7 shows the binding activity of PD-L1×CTLA4 bispecific antibody molecules to an hPDL1-His protein.

[0273] FIG. 8 shows the binding activity of PD-L1×CTLA4 bispecific antibody molecules to CHO-K1/hPDL1 cells.

[0274] FIG. 9 shows the binding activity of PD-L1×CTLA4 bispecific antibody molecules to MDA-MB-231 cells highly expressing human PD-L1.

[0275] FIG. 10 shows the activity of PD-L1×CTLA4 bispecific antibody molecules blocking the binding of CHO-K1/hPDL1 cells to its ligand protein PD-1.

[0276] FIG. 11 shows the killing ability of PD-L1×CTLA4 bispecific antibody molecules to CTLA4⁺ target cells by ADCC effect.

[0277] FIG. 12 shows the T cell activation ability of PD-L1×CTLA4 bispecific antibodies of IgG-VH structures in an SEB stimulation assay.

[0278] FIG. 13 shows the T cell activation ability of PD-L1×CTLA4 bispecific antibodies of Fab-HCAb structures in an SEB stimulation assay.

[0279] FIG. 14 shows that in the SEB stimulation assay, when VH is at the N-terminus of IgG HC or LC, the PD-L1×CTLA4 bispecific antibody has comparable or even stronger T cell activation ability than the 1:1 dose combination of the corresponding monoclonal antibodies.

[0280] FIG. 15 shows that in the SEB stimulation assay, the CTLA4 end has weakened activity in IgG_HC-VH (VH at the C-terminus of IgG HC) and Fab-HCAb structures as compared to its presence in IgG or HCAb bivalent structures, so that the its dose-related toxicity can be reduced.

[0281] FIG. 16 shows that in the mixed lymphocyte reaction assay, when VH is at the N-terminus of IgG HC or LC, the PD-L1×CTLA4 bispecific antibody has stronger T cell activation ability than the 1:1 dose combination of the corresponding monoclonal antibodies.

[0282] FIG. 17 shows that in the mixed lymphocyte reaction assay, when VH is at the C-terminus of IgG HC or LC, the PD-L1×CTLA4 bispecific antibody has stronger T cell activation ability than the PD-L1 monoclonal antibody.

[0283] FIG. 18 shows the binding activity of HER2×CTLA4 bispecific antibody molecules to CHO-K1/hCTLA4 cells.

[0284] FIG. 19 shows the activity of HER2×CTLA4 bispecific antibody molecules blocking the binding of human CTLA4 proteins to its ligand protein B7-1.

[0285] FIG. 20 shows the activity of HER2×CTLA4 bispecific antibody molecules blocking the binding of CHO-K1/hCTLA4 cells to its ligand protein B7-1.

[0286] FIG. 21 shows the binding activity of HER2×CTLA4 bispecific antibody molecules to SK-BR-3 cells.

[0287] FIG. 22 shows the killing ability of HER2×CTLA4 bispecific antibody molecules to HER2⁺ target cells by ADCC effect.

[0288] FIG. 23 shows the inhibition ability of HER2×CTLA4 bispecific antibody molecules to the proliferation of HER2⁺ target cell SK-BR-3.

[0289] FIG. 24 shows the binding ability of HER2×CTLA4 bispecific antibody molecules to CTLA4+ cells and HER2+ cells simultaneously.

[0290] FIG. 25 shows the T cell activation ability of HER2×CTLA4 bispecific antibody molecules in the SEB stimulation assay.

[0291] FIG. 26 shows the pharmacokinetics of HER2×CTLA4 bispecific antibody molecules in mice.

[0292] FIG. 27 shows the binding activity of PD-L1×4-1BB bispecific antibody molecules to CHO-K1/hPDL1 cells.

[0293] FIG. 28 shows the binding activity of 4-1BB antibody or PD-L1×4-1BB bispecific antibody molecules to CHO-K1/hu 4-1BB cells.

[0294] FIG. 29 shows the binding activity of PD-L1×4-1BB bispecific antibody molecules to CHO-K1/cyno 4-1BB cells.

[0295] FIG. 30 shows the specific T cell activation mediated by PD-L1×4-1BB bispecific antibody molecules via CHO-K1/hPDL1 cells.

[0296] FIG. 31 shows the specific T cell activation mediated by PD-L1×4-1BB bispecific antibody molecules via MDA-MB-231 cells.

[0297] FIG. 32 shows that in the mixed lymphocyte reaction assay, PD-L1×4-1BB bispecific antibody molecules of IgG-VH structures have stronger T cell activation ability than the bispecific antibody molecules of FIT-Ig structures.

[0298] FIG. 33 shows that in the mixed lymphocyte reaction assay, PD-L1×4-1BB bispecific antibody molecules of IgG-VH structures and Fab-HCAb structures have stronger T cell activation ability than the bispecific antibody molecules of FIT-Ig structures.

[0299] FIG. 34 shows the pharmacokinetics of PD-L1×4-1BB bispecific antibody molecules in mice.

[0300] FIG. 35 shows the binding activity of B7H4×4-1BB bispecific antibody molecules to SK-BR-3 cells.

[0301] FIG. 36 shows the binding activity of B7H4×4-1BB bispecific antibody molecules to CHO-K1/hu 4-1BB cells.

[0302] FIG. 37 shows the specific T cell activation (INFγ release) mediated by B7H4×4-1BB bispecific antibody molecules via SK-BR-3.

[0303] FIG. 38 shows the specific T cell activation (IL-2 release) mediated by B7H4×4-1BB bispecific antibody molecules via SK-BR-3.

[0304] FIG. 39 shows that the T cell activation by B7H4×4-1BB bispecific antibody molecules is specifically dependent on the expression of B7H4.

[0305] FIG. 40 shows the serum stability of B7H4×4-1BB bispecific antibody molecule PR003334.

[0306] FIG. 41 shows the serum stability of B7H4×4-1BB bispecific antibody molecule PR003335.

[0307] FIG. 42 shows the pharmacokinetics of B7H4×4-1BB bispecific antibody molecules in mice.

[0308] FIG. 43 shows the anti-tumor effect of B7H4×4-1BB bispecific antibody molecules in a mouse tumor model.

[0309] FIG. 44 shows the binding activity of BCMA HCAb antibodies to HEK293T/hBCMA cells.

[0310] FIG. 45 shows the binding activity of BCMA HCAb antibodies to HEK293T/cyno BCMA cells.

[0311] FIG. 46 shows the binding activity of BCMA HCAb antibodies to NCI-H929 cells.

[0312] FIG. 47 shows the internalization ability of BCMA HCAb antibodies to HEK293T/hBCMA cells.

[0313] FIG. 48 shows the affinity of BCMA HCAb antibodies to human BCMA (BLI method).

[0314] FIG. 49 shows the binding activity of variant molecules derived from the BCMA HCAb antibody PR001046 to NCI-H929 cells.

[0315] FIG. 50 shows the binding activity of BCMA×CD3 bispecific antibody molecules to HEK293T/hBCMA cells.

[0316] FIG. 51 shows the binding activity of BCMA×CD3 bispecific antibody molecules to HEK293T/cyno BCMA cells.

[0317] FIG. 52 shows the binding activity of BCMA×CD3 bispecific antibody molecules to NCI-H929 cells.

[0318] FIG. 53 shows the binding activity of BCMA×CD3 bispecific antibody molecules to human T cells.

[0319] FIG. 54 shows the binding activity of BCMA×CD3 bispecific antibody molecules to cynomolgus monkey T cells.

[0320] FIG. 55 shows the killing ability of BCMA×CD3 bispecific antibody molecules of scFv-Fc-VH (2) asymmetric structures to NCI-H929 cells.

[0321] FIG. 56 shows the killing ability of BCMA×CD3 bispecific antibody molecules of scFv-Fc-VH (1) asymmetric structures to NCI-H929 cells.

[0322] FIG. 57 shows the killing ability of BCMA×CD3 bispecific antibody molecules of Fab-Fc-VH (1) asymmetric structures to NCI-H929 cells.

[0323] FIG. 58 shows the killing ability of BCMA×CD3 bispecific antibody molecules of Fab-Fc-VH (2) asymmetric structures to NCI-H929 cells.

[0324] FIG. 59 shows the specific killing of effector cells on NCI-H929 cells mediated by BCMA×CD3 bispecific antibody molecules (PR001990 and PR002309) and determination of release of cytokines.

[0325] FIG. 60 shows the specific killing of effector cells on NCI-H929 cells mediated by BCMA×CD3 bispecific antibody molecules (PR002895, PR002953, PR003178) and determination of release of cytokines.

[0326] FIG. 61 shows the influence of soluble APRIL or BAFF on the target cell killing effect of BCMA×CD3 bispecific antibody molecules.

[0327] FIG. 62 shows the influence of soluble BCMA on the target cell killing effect of BCMA×CD3 bispecific antibody molecules.

[0328] FIG. 63 shows the pharmacokinetics of BCMA×CD3 bispecific antibody molecules in mice or rats.

[0329] FIG. 64 shows the anti-tumor effect of BCMA×CD3 bispecific antibody molecules in a mouse tumor model.

[0330] FIG. 65 shows the analysis results of SDS-PAGE and SEC-HPLC of protein samples obtained by transient transfection and expression and one-step affinity purification of the bispecific antibody molecules.

[0331] FIG. 66 shows the binding activity of CD3 antibodies to human T cells.

[0332] FIG. 67 shows the anti-tumor effect of PD-L1×CTLA4 bispecific antibody molecules in a mouse tumor model.

### DETAILED DESCRIPTION

[0333] The embodiments of the present invention are described below with reference to specific examples, and other advantages and effects of the present invention will be readily apparent to those skilled in the art from the disclosure of the present specification.

[0334] In the present application, the term “antibody” or “H2L2” generally refers to a conventional four-chain antibody. Antibodies of most species exhibit a “Y”-type tetrameric structure comprising two identical heavy chains (H chains) and two identical light chains (L chains), which are also referred to as “H2L2”. The heavy chain comprises a heavy chain variable region (VH) near the N-terminus and a heavy chain constant region (CH) near the C-terminus; and the light chain comprises a light chain variable region (VL) near the N-terminus and a light chain constant region (CL) near the C-terminus. The heavy chain constant region of IgG antibody has 3 domains, namely CH1, CH2 and CH3; and has a hinge region between CH1 and CH2. According to the types κ and λ of the light chains, the light chain variable regions are further divided into Vκ and Vλ, and the corresponding light chain constant regions are Cκ and Cλ, respectively. The variable region of the antibody is the primary site where it recognizes and binds to the antigen; and the variable domains VH and VL and the constant domains CH1 and CL of the antibody together constitute the antigen-binding fragment (Fab). The CH2 and CH3 constitute the fragment crystallizable (Fc), which is the main region that exerts the effector functions of the antibody such as complement-dependent cytotoxicity (CDC) and antibody-dependent cell-mediated cytotoxicity (ADCC) effects, and affects the serum half-life of the antibody.

[0335] In the present application, the term “heavy-chain antibody” or “HCAb” generally refers to a class of antibodies that contain only a heavy chain dimer. A heavy-chain antibody (HCAb) lacking light chains is naturally present in the sera of Camelidae species and sharks. The heavy-chain antibody derived from Camelidae species has no CH1 region between the heavy chain variable region and the hinge region thereof, and contains only one heavy chain variable region (VHH) and two heavy chain constant domains (CH2 and CH3), in addition to the lack of light chains, as compared to the conventional H2L2 antibodies; and the basic structure thereof is a heavy chain dimer. The VHH fragment of the heavy-chain antibody of Camelidae species has different characteristics from the VH of the conventional antibodies, and the VHH structure cloned and expressed separately has structural stability and antigen-binding activity that are comparable to the original heavy-chain antibody, but has a molecular weight of only about 13 kDa, and is therefore also referred to as a nanobody or a single-domain antibody.

[0336] In the present application, the term “binding protein” or “antigen-binding protein” generally refers to a protein comprising an antigen-binding moiety, and optionally a scaffold or framework moiety that allows the antigen-binding moiety to adopt a conformation that facilitates the binding of the antigen-binding protein to the antigen. An antibody may typically comprise an antibody light chain variable region (VL) or an antibody heavy chain variable region (VH), or both. The VH and VL regions can be further divided into hypervariable regions termed complementarity determining regions (CDRs), which are scattered over more conserved regions termed framework regions (FRs). Each VH and VL can consist of three CDR regions and four FR regions arranged from amino-terminus to carboxyl-terminus in the following order: FR-1, CDR1, FR-2, CDR2, FR-3, CDR3 and FR-4. The variable regions of the heavy and light chains comprise binding domains that interact with antigens. The three CDRs of VH are denoted as HCDR1, HCDR2 and HCDR3, respectively, and may also be denoted as VH CDR1, VH CDR2 and VH CDR3, respectively; and the three CDRs of VL are denoted as LCDR1, LCDR2 and LCDR3, respectively, and may also be denoted as VL CDR1, VL CDR2 and VL CDR3, respectively. Examples of the antigen-binding proteins include, but are not limited to, antibodies, antigen-binding fragments (Fab, Fab′, F(ab)₂, Fv fragment, F(ab′)₂, scFv, di-scFv and/or dAb), immunoconjugates, multispecific antibodies (e.g., bispecific antibodies), antibody fragments, antibody derivatives, antibody analogs or fusion proteins, as long as they exhibit the desired antigen-binding activity.

[0337] In the present application, the amino acid sequences of the CDRs are shown according to the Chothia scheme. However, it is well known to those skilled in the art that the CDRs of an antibody can be defined in the art using a variety of methods, such as the Kabat scheme based on sequence variability (see Kabat et al., Sequences of Proteins of Immunological Interest, Fifth Edition, National Institutes of Health (U.S.), Bethesda, Maryland (1991)), and the Chothia scheme based on the location of the structural loop regions (see J Mol Biol 273: 927-48, 1997). In the technical solution of the present invention, the Combined scheme comprising the Kabat scheme and the Chothia scheme can also be used to determine the amino acid residues in a variable domain sequence. The Combined scheme combines the Kabat scheme with the Chothia scheme to obtain a larger range. See the table below for details. It will be understood by those skilled in the art that unless otherwise specified, the terms “CDR” and “complementary determining region” of a given antibody or a region (e.g., variable region) thereof are construed as encompassing complementary determining regions as defined by any one of the above known schemes described herein. Although the scope claimed in the present invention is the sequences shown based on the Chothia scheme, the amino acid sequences corresponding to the other schemes for numbering CDRs shall also fall within the scope of the present invention.

TABLE I
The schemes for numbering the CDRs of
the antibody of the present invention

| | Kabat | Chothia | Combined |
|---|---|---|---|
| LCDR1 | L24--L34 | L24--L34 | L24-L34 |
| LCDR2 | L50--L56 | L50--L56 | L50-L56 |
| LCDR3 | L89--L97 | L89--L97 | L89-L97 |
| HCDR1 | H31--H35 | H26--H32 | H26-H35 |
| HCDR2 | H50--H65 | H52--H56 | H50-H65 |
| HCDR3 | H95--H102 | H95--H102 | H95-H102 |

[0338] Laa-Lbb can refer to an amino acid sequence from position aa (the Chothia scheme) to position bb (the Chothia scheme) beginning at the N-terminus of the light chain of the antibody; and Haa-Hbb can refer to an amino acid sequence from position aa (the Chothia scheme) to position bb (the Chothia scheme) beginning at the N-terminus of the heavy chain of the antibody. For example, L24-L34 can refer to the amino acid sequence from position 24 to position 34 according to the Chothia scheme beginning at the N-terminus of the light chain of the antibody; H26-H32 can refer to the amino acid sequence from position 26 to position 32 according to the Chothia scheme beginning at the N-terminus of the heavy chain of the antibody. It should be known to those skilled in the art that there are positions where insertion sites are present in numbering CDRs with the Chothia scheme (see http://bioinf.org.uk/abs/).

[0339] In the present application, the term “monoclonal antibody” generally refers to an antibody obtained from a population of substantially homogeneous antibodies, that is, the individual antibodies in the population are identical except for a small amount of natural mutations that may exist. Monoclonal antibodies are generally highly specific for a single antigenic site. Moreover, unlike conventional polyclonal antibody preparations (which generally have different antibodies directed against different determinants), each monoclonal antibody is directed against a single determinant on the antigen. In addition to their specificity, monoclonal antibodies have the advantage that they can be synthesized by hybridoma culture without contamination by other immunoglobulins. The modifier “monoclonal” indicates the characteristic of the antibody obtained from a population of substantially homogeneous antibodies, and is not to be construed as requiring production of the antibody by any particular method. For example, monoclonal antibodies used according to the present invention can be prepared in hybridoma cells or can be prepared by the recombinant DNA method.

[0340] In this application, the term “fully human antibody” generally refers to an antibody that is expressed by a genetically engineered antibody gene-deleted animal into which the entire gene that encodes an antibody in human is transferred. All parts of the antibody (including the variable and constant regions of the antibody) are encoded by genes of human origin. The fully human antibody can greatly reduce the immune side effects caused in the human body by the heterologous antibody. Methods for obtaining fully human antibodies in the art can include phage display, transgenic mice, and the like.

[0341] In the present application, the term “fully human heavy-chain antibody” generally refers to a heavy-chain antibody having a human antibody variable region VH obtained using Harbour HCAb transgenic mice (Patent Application WO2007/096779). The endogenous antibody heavy chain locus and light chain locus of the transgenic mice are knocked out or inactivated, making it impossible to produce mouse antibodies; then, the human antibody heavy chain gene fragments (V, D, J fragments) are transferred into the mice, and antibodies with human antibody gene sequences are generated by the rearrangement and mutation mechanism of the mice, the variable regions of which are human VHs. The human VH and the human heavy chain constant region Fc are fused and recombined to obtain the fully human heavy-chain antibody.

[0342] In the present application, the term “specifically bind to” generally refers to that an antibody binds to an epitope via its antigen-binding domain, and that the binding requires some complementarity between the antigen-binding domain and the epitope. According to this definition, an antibody is said to “specifically bind to” an antigen when the antibody more easily binds to an epitope via its antigen-binding domain than binds to a random, unrelated epitope. “Epitope” refers to a specific atomic group (e.g., saccharide side chain, phosphoryl, sulfonyl) or an amino acid on an antigen that binds to an antigen-binding protein (e.g., an antibody).

[0343] In the present application, the term “Fab” generally refers to the portion of a conventional antibody (e.g., IgG) that binds to an antigen, including the heavy chain variable region VH, the light chain variable region VL, the heavy chain constant region domain CH1 and the light chain constant region CL of the antibody. In conventional antibodies, the C-terminus of VH is linked to the N-terminus of CH1 to form a heavy chain Fd fragment, the C-terminus of VL is linked to the N-terminus of CL to form a light chain, and the C-terminus of CH1 is further linked to the hinge region and other constant region domains of the heavy chain to form a heavy chain. In some embodiments, “Fab” also refers to a variant structure of the Fab. For example, in certain embodiments, the C-terminus of VH is linked to the N-terminus of CL to form one polypeptide chain, and the C-terminus of VL is linked to the N-terminus of CH1 to form another polypeptide chain, in which case an Fab (cross VH/VL) structure is formed; in certain embodiments, CH1 of the Fab is not linked to the hinge region, but rather the C-terminus of CL is linked to the hinge region of the heavy chain, in which case an Fab (cross Fd/LC) structure is formed.

[0344] In the present application, the term “VH” generally refers to the heavy chain variable region VH domain of an antibody, i.e., the heavy chain variable region VH of a conventional antibody (H2L2 structure) from human or other animals, the heavy chain variable region VHH of a heavy-chain antibody (HCAb structure) from animals such as those of Camelidae species, or the heavy chain variable region VH of a fully human heavy-chain antibody (HCAb structure) produced using a Harbour HCAb transgenic mouse.

[0345] In the present application, the term “binding domain” generally refers to any protein functional region that can specifically bind to the antigen, either “Fab” or “VH”, or other antigen-binding forms (e.g., derived protein structures such as lipocalins, neuronal cell adhesion molecules (NCAMs), fibronectins, designed ankyrin repeat proteins (DARPins) and the like).

[0346] In the present application, the term “binding valence” generally refers to the number of “binding domains” in a binding protein, and also refers to the maximum number of antigen molecules or epitopes to which the binding protein can bind. For example, a conventional IgG antibody has a binding valence of two because it is capable of binding to two identical antigen molecules simultaneously; whereas a Fab antibody has a binding valence of one.

[0347] In the present application, the term “bispecific binding protein” generally refers to a binding protein having two antigen-binding specificities. The two antigen-binding specificities may refer to binding to two different antigens or to two different epitopes on the same antigen. Bispecific binding proteins may typically include bispecific antibodies, derivatives thereof and the like.

[0348] In the present application, the term “multispecific binding protein” generally refers to a binding protein having two or more antigen-binding specificities. Multispecific binding proteins may typically include multispecific antibodies, derivatives thereof and the like.

[0349] In the present application, the term “MFI” (mean fluorescence intensity) generally refers to the fluorescence intensity signal and its mathematical mean value analyzed in flow cytometry FACS, which can generally be obtained by processing and analyzing data generated by flow cytometer with specialized software such as FlowJo (FlowJo, LLC).

[0350] In the present application, the term “PD-L1” generally refers to the programmed death ligand 1 protein, a functional variant thereof and/or a functional fragment thereof. PD-L1 is also known as cluster of differentiation 274 (CD274) or B7 homologue 1 (B7-H1) and is a protein encoded by the CD274 gene (in human). The sequence of PD-L1 is known in the art. For example, the amino acid sequence of an exemplary full-length human PD-L1 protein can be found under NCBI accession No. NP_054862 or UniProt accession No. Q9NZQ7; and the sequence of an exemplary full-length cynomolgus monkey PD-L1 protein can be found under NCBI accession No. XP_005581836 or Uniprot accession No. G7PSE7.

[0351] In the present application, the term “PD-1” generally refers to the programmed death 1 receptor (also known as CD279), a functional variant thereof and/or a functional fragment thereof. The sequence of PD-1 is known in the art. For example, the sequence of an exemplary full-length human PD-1 protein can be found under NCBI accession No. NP_005009; and the sequence of an exemplary full-length cynomolgus monkey PD-1 protein can be found under NCBI accession No. NP_001271065 or Uniprot accession No. B0LAJ3.

[0352] In the present application, the term “CD80” generally refers to the cluster of differentiation 80 (also known as B7-1), a functional variant thereof and/or a functional fragment thereof. The sequence of CD80 is known in the art. For example, the sequence of an exemplary full-length human CD80 can be found under Uniprot accession No. P33681.

[0353] In the present application, the term “CTLA4” generally refers to the cytotoxic T lymphocyte-associated antigen-4 (also known as CD152), a functional variant thereof and/or a functional fragment thereof. The sequence of CTLA4 is known in the art. For example, the sequence of an exemplary full-length human CTLA4 can be found under Uniprot accession No. P16410; and the sequence of an exemplary full-length cynomolgus monkey CTLA4 can be found under Uniprot accession No. G7PL88.

[0354] In the present application, the term “HER2” generally refers to the receptor tyrosine kinase erbB-2 (also known as ERBB2), a functional variant thereof and/or a functional fragment thereof. The sequence of HER2 is known in the art. For example, the sequence of an exemplary full-length human HER2 can be found under Uniprot accession No. P04626; and the sequence of an exemplary full-length cynomolgus monkey HER2 can be found under NCBI accession No. XP_005584091.

[0355] In the present application, the term “B7H4” generally refers to the V-Set domain-containing T-cell activation inhibitor 1 (also known as VTCN1), a functional variant thereof and/or a functional fragment thereof. The sequence of B7H4 is known in the art. For example, the sequence of an exemplary full-length human B7H4 can be found under Uniprot accession No. Q7Z7D3; the sequence of an exemplary full-length cynomolgus monkey B7H4 can be found under NCBI accession No. XP_005542249; and the sequence of an exemplary full-length mouse B7H4 can be found under Uniprot accession No. Q7TSP5.

[0356] In the present application, the term “4-1BB” generally refers to the tumor necrosis factor receptor superfamily member 9 (also known as CD137, 4-1BBL receptor), a functional variant thereof and/or a functional fragment thereof. The sequence of 4-1BB is known in the art. For example, the sequence of an exemplary full-length human 4-1BB can be found under Uniprot accession No. Q07011; and the sequence of an exemplary full-length cynomolgus monkey 4-1BB can be found under NCBI accession No. XP_005544945.

[0357] In the present application, the term “BCMA” generally refers to the tumor necrosis factor receptor superfamily member 17 (also known as CD269, B cell maturation protein), a functional variant thereof and/or a functional fragment thereof. The sequence of BCMA is known in the art. For example, the sequence of an exemplary full-length human BCMA can be found under Uniprot accession No. Q02223; and the sequence of an exemplary full-length cynomolgus monkey BCMA can be found under NCBI accession No. XP_005591343.

[0358] In the present application, the term “BAFF” generally refers to the tumor necrosis factor ligand superfamily member 13B (also known as CD257, B cell activating factor), a functional variant thereof and/or a functional fragment thereof. The sequence of BAFF is known in the art. For example, the sequence of an exemplary full-length human BAFF can be found under Uniprot accession No. Q9Y275.

[0359] In the present application, the term “APRIL” generally refers to the tumor necrosis factor ligand superfamily member 13 (also known as CD256, proliferation-inducing ligand), a functional variant thereof and/or a functional fragment thereof. The sequence of APRIL is known in the art. For example, the sequence of an exemplary full-length human APRIL can be found under Uniprot accession No. 075888.

[0360] In the present application, the term “CD3” generally refers to the TCR/CD3 receptor protein complex on T cells. The specificity of the T cell response is mediated by the recognition of pMHC by the molecular complex of TCR and CD3. TCR is a heterodimer formed by two different transmembrane polypeptide chains, and the peptide chains comprise four types: α, β, γ and δ. According to the different combinations of the peptide chains, TCR is divided into TCRαβ and TCRγδ. CD3 has different transmembrane polypeptide chains, i.e., γ, δ, ε and ζ, which interact to form homodimers or heterodimers as part of the TCR-CD3 complex. Since the cytoplasmic region of the TCR peptide chain is very short, it is believed that the activation signal generated by the recognition of antigen by TCR is transduced into T cells by the CD3 peptide chain.

[0361] In the present application, the term “CD3E” generally refers to the c peptide chain of “CD3”. The sequence of CD3E is known in the art. For example, the sequence of an exemplary full-length human CD3E can be found under Uniprot accession No. P07766; and the sequence of an exemplary full-length cynomolgus monkey CD3E can be found under Uniprot accession No. Q95115.

### EXAMPLES

[0362] The present invention is further illustrated by the following examples, which are not intended to limit the present invention. The examples do not include detailed descriptions of conventional methods, such as those methods for constructing vectors and plasmids, methods for inserting genes encoding proteins into such vectors and plasmids, or methods for introducing plasmids into host cells. Such methods are well known to those of ordinary skill in the art and are described in numerous publications. Experimental procedures without specified conditions in the following examples are performed in accordance with conventional procedures and conditions, or in accordance with instructions.

### Example 1. Structural Design of Multispecific Binding Proteins Based on HCAb

[0363] In this example, the structures of several Fc-containing, symmetric or asymmetric, multivalent and multispecific binding proteins constructed using fully human heavy-chain antibodies (HCAbs) and single-domain antibodies (sdAbs) derived therefrom were listed. In some structures, the domains are linked via linker peptides. In some structures, amino acid mutations were introduced into the Fc region of the heavy chain to alter its binding to Fc receptors, thereby altering the associated effector functions or other properties. In some structures, different amino acid mutations were introduced into the Fc regions of the two heavy chains to reduce the homodimerization of heavy chains.

[0364] The molecular structures of the multispecific binding proteins included in the present application are listed in Table 1-1 and FIG. 1, each of which will be further described below. In this example and other parts of the present application, when referring to the number of polypeptide chains contained in a molecular structure, it generally refers to the number of “different polypeptide chains”. For example, a conventional IgG antibody has two different polypeptide chains, i.e., a heavy chain and a light chain, and although the IgG antibody molecule itself is a tetrapeptide chain protein molecule containing two identical heavy chains and two identical light chains, its structural characteristics are described with specific reference to its two different polypeptide chains. Binding valence refers to the number of antigen-binding sites in the molecular structure. For example, a conventional IgG antibody can bind to two identical antigen molecules simultaneously, with a binding valence of two. The sequences of the linker peptides that may be used in the structural design of the present application are listed in Table 1-2.

TABLE 1-1
Molecular structures of multispecific binding proteins
based on HCAb listed in the present application

| | | | | | Number of |
|---|---|---|---|---|---|
| | | | | | different |
| Structure | | | Binding | | polypeptide |
| No. | Structure mode | Structure type | valence | Symmetry | chains |
| 1 | Fab(CL)-VH-Fc | Fab-HCAb | Tetravalent | Symmetric | 2 |
| 2 | Fab(CH1)-VH-Fc | Fab-HCAb | Tetravalent | Symmetric | 2 |
| 3 | VH-IgG_HC | IgG-VH | Tetravalent | Symmetric | 2 |
| 4 | VH-IgG_LC | IgG-VH | Tetravalent | Symmetric | 2 |
| 5 | IgG_HC-VH | IgG-VH | Tetravalent | Symmetric | 2 |
| 6 | IgG_LC-VH | IgG-VH | Tetravalent | Symmetric | 2 |
| 7 | IgG_HC-VH-VH | IgG-VH(2) | Hexavalent | Symmetric | 2 |
| 8 | IgG_HC-VH′-VH″ | IgG-VH(2) | Hexavalent | Symmetric | 2 |
| 9 | 2 × VH-IgG(HC + LC) | 2 × VH-IgG | Hexavalent | Symmetric | 2 |
| 10 | (VH′ + VH″)-IgG(HC + LC) | 2 × VH-IgG | Hexavalent | Symmetric | 2 |
| 11 | Fab-Fc-VH | Fab-Fc-VH | Bivalent | Asymmetric | 3 |
| 12 | Fab(cross VH/VL)-Fc-VH | Fab-Fc-VH | Bivalent | Asymmetric | 3 |
| 13 | Fab(cross Fd/LC)-Fc-VH | Fab-Fc-VH | Bivalent | Asymmetric | 3 |
| 14 | Fab-Fc-VH-VH | Fab-Fc-VH(2) | Trivalent | Asymmetric | 3 |
| 15 | Fab-Fc-VH′-VH″ | Fab-Fc-VH(2) | Trivalent | Asymmetric | 3 |
| 16 | Fab(cross VH/VL)-Fc-VH-VH | Fab-Fc-VH(2) | Trivalent | Asymmetric | 3 |
| 17 | Fab(cross VH/VL)-Fc-VH′-VH″ | Fab-Fc-VH(2) | Trivalent | Asymmetric | 3 |
| 18 | Fab(cross Fd/LC)-Fc-VH-VH | Fab-Fc-VH(2) | Trivalent | Asymmetric | 3 |
| 19 | Fab(cross Fd/LC)-Fc-VH′-VH″ | Fab-Fc-VH(2) | Trivalent | Asymmetric | 3 |
| 20 | scFv(VL − VH)-Fc-VH | scFv-Fc-VH | Bivalent | Asymmetric | 2 |
| 21 | scFv(VH − VL)-Fc-VH | scFv-Fc-VH | Bivalent | Asymmetric | 2 |
| 22 | scFv(VL − VH)-Fc-VH-VH | scFv-Fc-VH(2) | Trivalent | Asymmetric | 2 |
| 23 | scFv(VH − VL)-Fc-VH-VH | scFv-Fc-VH(2) | Trivalent | Asymmetric | 2 |
| 24 | scFv(VL − VH)-Fc-VH′-VH″ | scFv-Fc-VH(2) | Trivalent | Asymmetric | 2 |
| 25 | scFv(VH − VL)-Fc-VH′-VH″ | scFv-Fc-VH(2) | Trivalent | Asymmetric | 2 |
| 26 | Fab-Fc-VH-VH-VH | Fab-Fc-VH(3) | Tetravalent | Asymmetric | 3 |
| 27 | Fab-Fc-VH′-VH″-VH′″ | Fab-Fc-VH(3) | Tetravalent | Asymmetric | 3 |

TABLE 1-2
Sequences of linker peptides

| Name of linker peptide | Length | Sequence of linker peptide | SEQ ID NO |
|---|---|---|---|
| GS_2 | 2 | GS | None |
| GS_4 | 4 | GSGS | 495 |
| GS_5 | 5 | GGGGS | 496 |
| GS_6 | 6 | GGSGGS | 497 |
| GS_7 | 7 | GGGGSGS | 498 |
| GS_15 | 15 | GGGGSGGGGSGGGGS | 499 |
| GS_20 | 20 | GGGGSGGGGSGGGGSGGGGS | 500 |
| GS_25 | 25 | GGGGSGGGGSGGGGSGGGGSGGGGS | 501 |
| H1_15 | 15 | EPKSSDKTHTPPPPP | 502 |
| UH1 | 6 | EPKSSD | 503 |
| LH1 | 10 | DKTHTCPPCP | 504 |
| G5-LH | 15 | GGGGGDKTHTCPPCP | 505 |
| H1_15-RT | 17 | EPKSSDKTHTPPPPPRT | 506 |
| AS-GS_15 | 17 | ASGGGGSGGGGSGGGGS | 507 |
| L-GS_15-RT | 18 | LGGGGSGGGGSGGGGSRT | 508 |
| L-H1_15-RT | 18 | LEPKSSDKTHTPPPPPRT | 509 |
| KL-H1_15-RT | 19 | KLEPKSSDKTHTPPPPPRT | 510 |
| KL-H1_15-AS | 19 | KLEPKSSDKTHTPPPPPAS | 511 |
| RT-GS_5-KL | 9 | RTGGGGSKL | 512 |
| RT-GS_15-KL | 19 | RTGGGGSGGGGSGGGGSKL | 513 |
| RT-GS_25-KL | 29 | RTGGGGSGGGGSGGGGSGGGGSGGGGSKL | 514 |
| Human IgG1 hinge | 15 | EPKSCDKTHTCPPCP | 515 |
| Human IgG1 hinge | 15 | EPKSSDKTHTCPPCP | 516 |
| (C220S) | | | |
| Human IgG2 hinge | 12 | ERKCCVECPPCP | 517 |
| Human IgG4 hinge | 12 | ESKYGPPCPSCP | 518 |
| Human IgG4 hinge | 12 | ESKYGPPCPPCP | 519 |
| (S228P) | | | |

### Example 1.1. Fab-HCAb Symmetric Structure

[0365] The present invention provides a method for constructing a bispecific binding protein using two parent monoclonal antibodies: a conventional antibody A binding to a first antigen and a heavy-chain antibody B binding to a second antigen.

[0366] As shown in FIG. 1 (1-2), the Fab end is derived from the conventional antibody A, and VH_A and VL_A are the heavy chain variable region and the light chain variable region of the antibody A, respectively. The VH end is derived from the heavy-chain antibody B, and VH_B is the heavy chain variable region of the heavy-chain antibody B. CL is the light chain constant region domain. CH1, CH2 and CH3 are the first, second and third domains of the heavy chain constant region, respectively. L1 and L2 are the first and second linker peptides, respectively.

### Example 1.1.1. Structure (1): Fab(CL)-VH-Fc

[0367] The binding protein of structure (1) comprises two different polypeptide chains: a polypeptide chain 1 or a first polypeptide chain, also known as a short chain, comprising VH_A-CH1 from the amino-terminus to the carboxyl-terminus; and a polypeptide chain 2 or a second polypeptide chain, also known as a long chain, comprising VL_A-CL-L1-VH_B-L2-CH2-CH3 from the amino-terminus to the carboxyl-terminus. In structure (1), VL_A of the antibody A and VH_B of the heavy-chain antibody B are fused on the same polypeptide chain, so that the mismatched byproducts generated by the association of VL_A and VH_B can be avoided.

[0368] VH_B of the polypeptide chain 2 is linked to CH2 via a linker peptide L2; L2 may be a hinge region or a hinge region-derived linker peptide sequence of IgG or the sequence listed in Table 1-2, preferably the sequence of human IgG1 hinge region, human IgG1 hinge (C220S) or G5-LH.

[0369] In one embodiment, CL of the polypeptide chain 2 is fusion-linked directly to VH_B, i.e., L1 is 0 in length. In another embodiment, CL of the polypeptide chain 2 is linked to VH_B via a linker peptide L1; and L1 may be the sequence listed in Table 1-2.

### Example 1.1.2. Structure (2): Fab(CH1)-VH-Fc

[0370] The binding protein of structure (2) comprises two different polypeptide chains: a polypeptide chain 1 or a first polypeptide chain, also known as a short chain, comprising VL_A-CL from the amino-terminus to the carboxyl-terminus; and a polypeptide chain 2 or a second polypeptide chain, also known as a long chain, comprising VH_A-CH1-L1-VH_B-L2-CH2-CH3 from the amino-terminus to the carboxyl-terminus.

[0371] VH_B of the polypeptide chain 2 is linked to CH2 via a linker peptide L2; L2 may be a hinge region or a hinge region-derived linker peptide sequence of IgG or the sequence listed in Table 1-2, preferably the sequence of human IgG1 hinge region, human IgG1 hinge (C220S) or G5-LH.

[0372] In one embodiment, CH1 of the polypeptide chain 2 is fusion-linked directly to VH_B, i.e., L1 is 0 in length. In another embodiment, CH1 of the polypeptide chain 2 is linked to VH_B via a linker peptide L1; and L1 may be the sequence listed in Table 1-2.

### Example 1.2. IgG-VH Tetravalent Symmetric Structure

[0373] The present invention provides a method for constructing a bispecific binding protein using two parent monoclonal antibodies: a conventional antibody A binding to a first antigen and a heavy-chain antibody B binding to a second antigen.

[0374] As shown in FIG. 1 (3-6), the Fab end is derived from the conventional antibody A, and VH_A and VL_A are the heavy chain variable region and the light chain variable region of the antibody A, respectively. The VH end is derived from the heavy-chain antibody B, and VH_B is the heavy chain variable region of the heavy-chain antibody B. CL is the light chain constant region domain. CH1, CH2 and CH3 are the first, second and third domains of the heavy chain constant region, respectively. L is a linker peptide, and h is a hinge region or derived sequence of an IgG antibody.

### Example 1.2.1. Structure (3): VH-IgG_HC

[0375] The binding protein of structure (3) comprises two different polypeptide chains: a polypeptide chain 1 or a first polypeptide chain, also known as a short chain, comprising VL_A-CL from the amino-terminus to the carboxyl-terminus; and a polypeptide chain 2 or a second polypeptide chain, also known as a long chain, comprising VH_B-L-VH_A-CH1-h-CH2-CH3 from the amino-terminus to the carboxyl-terminus.

[0376] In one embodiment, VH_B of the polypeptide chain 2 is fusion-linked directly to VH_A, i.e., L is 0 in length. In another embodiment, VH_B of the polypeptide chain 2 is linked to VH_A via a linker peptide L; and L may be the sequence listed in Table 1-2.

### Example 1.2.2. Structure (4): VH-IgG_LC

[0377] The binding protein of structure (4) comprises two different polypeptide chains: a polypeptide chain 1 or a first polypeptide chain, also known as a short chain, comprising VH_B-L-VL_A-CL from the amino-terminus to the carboxyl-terminus; and a polypeptide chain 2 or a second polypeptide chain, also known as a long chain, comprising VH_A-CH1-h-CH2-CH3 from the amino-terminus to the carboxyl-terminus.

[0378] In one embodiment, VH_B of the polypeptide chain 1 is fusion-linked directly to VL_A, i.e., L is 0 in length. In another embodiment, VH_B of the polypeptide chain 1 is linked to VL_A via linker peptide L; and L may be the sequence listed in Table 1-2.

### Example 1.2.3. Structure (5): IgG_HC-VH

[0379] The binding protein of structure (5) comprises two different polypeptide chains: a polypeptide chain 1 or a first polypeptide chain, also known as a short chain, comprising VL_A-CL from the amino-terminus to the carboxyl-terminus; and a polypeptide chain 2 or a second polypeptide chain, also known as a long chain, comprising VH_A-CH1-h-CH2-CH3-L-VH_B from the amino-terminus to the carboxyl-terminus.

[0380] In one embodiment, CH3 of the polypeptide chain 2 is fusion-linked directly to VH_B, i.e., L is 0 in length. In another embodiment, CH3 of the polypeptide chain 2 is linked to VH_B via a linker peptide L; and L may be the sequence listed in Table 1-2.

### Example 1.2.4. Structure (6): IgG_LC-VH

[0381] The binding protein of structure (6) comprises two different polypeptide chains: a polypeptide chain 1 or a first polypeptide chain, also known as a short chain, comprising VL_A-CL-L-VH_B from the amino-terminus to the carboxyl-terminus; and a polypeptide chain 2 or a second polypeptide chain, also known as a long chain, comprising VH_A-CH1-h-CH2-CH3 from the amino-terminus to the carboxyl-terminus.

[0382] In one embodiment, CL of the polypeptide chain 1 is fusion-linked directly to VH_B, i.e., L is 0 in length. In another embodiment, CL of the polypeptide chain 1 is linked to VH_B via a linker peptide L; and L may be the sequence listed in Table 1-2.

### Example 1.3. IgG-VH(2) Hexavalent Symmetric Structure

[0383] The present invention provides a method for constructing a bispecific binding protein using two parent monoclonal antibodies: a conventional antibody A binding to a first antigen and a heavy-chain antibody B binding to a second antigen.

[0384] The present invention further provides a method for constructing a trispecific binding protein using three parent monoclonal antibodies: a conventional antibody A binding to a first antigen, a heavy-chain antibody B binding to a second antigen, and a heavy-chain antibody C binding to a third antigen.

[0385] As shown in FIG. 1 (7-8), the Fab end is derived from the conventional antibody A, and VH_A and VL_A are the heavy chain variable region and the light chain variable region of the antibody A, respectively. The VH end is derived from the heavy-chain antibody B or the heavy-chain antibody C, VH_B is the heavy chain variable region of the heavy-chain antibody B, and VH_C is the heavy chain variable region of the heavy-chain antibody C. CL is the light chain constant region domain. CH1, CH2 and CH3 are the first, second and third domains of the heavy chain constant region, respectively. L1 and L2 are the first and second linker peptides, respectively, and h is a hinge region or derived sequence of an IgG antibody.

### Example 1.3.1. Structure (7): IgG_HC-VH-VH

[0386] Structure (7) represents a bispecific binding protein comprising two different polypeptide chains: a polypeptide chain 1 or a first polypeptide chain, also known as a short chain, comprising VL_A-CL from the amino-terminus to the carboxyl-terminus; and a polypeptide chain 2 or a second polypeptide chain, also known as a long chain, comprising VH_A-CH1-h-CH2-CH3-L1-VH_B-L2-VH_B from the amino-terminus to the carboxyl-terminus.

[0387] In one embodiment, CH3 of the polypeptide chain 2 is fusion-linked directly to VH_B, i.e., L1 is 0 in length. In another embodiment, CH3 of the polypeptide chain 2 is linked to VH_B via a linker peptide L1; and L1 may be the sequence listed in Table 1-2.

[0388] In one embodiment, a first VH_B of the polypeptide chain 2 is fusion-linked directly to a second VH_B, i.e., L2 is 0 in length. In another embodiment, a first VH_B of the polypeptide chain 2 is linked to a second VH_B via a linker peptide L2; and L2 may be the sequence listed in Table 1-2.

### Example 1.3.2. Structure (8): IgG_HC-VH′-VH″

[0389] Structure (8) represents a trispecific binding protein comprising two different polypeptide chains: a polypeptide chain 1 or a first polypeptide chain, also known as a short chain, comprising VL_A-CL from the amino-terminus to the carboxyl-terminus; and a polypeptide chain 2 or a second polypeptide chain, also known as a long chain, comprising VH_A-CH1-h-CH2-CH3-L1-VH_B-L2-VH_C from the amino-terminus to the carboxyl-terminus.

[0390] In one embodiment, CH3 of the polypeptide chain 2 is fusion-linked directly to VH_B, i.e., L1 is 0 in length. In another embodiment, CH3 of the polypeptide chain 2 is linked to VH_B via a linker peptide L1; and L1 may be the sequence listed in Table 1-2.

[0391] In one embodiment, VH_B of the polypeptide chain 2 is fusion-linked directly to VH_C, i.e., L2 is 0 in length. In another embodiment, VH_B of the polypeptide chain 2 is linked to VH_C via a linker peptide L2; and L2 may be the sequence listed in Table 1-2.

### Example 1.4. 2×VH-IgG Hexavalent Symmetric Structure

[0392] The present invention provides a method for constructing a bispecific binding protein using two parent monoclonal antibodies: a conventional antibody A binding to a first antigen and a heavy-chain antibody B binding to a second antigen.

[0393] The present invention further provides a method for constructing a trispecific binding protein using three parent monoclonal antibodies: a conventional antibody A binding to a first antigen, a heavy-chain antibody B binding to a second antigen, and a heavy-chain antibody C binding to a third antigen.

[0394] As shown in FIG. 1 (9-10), the Fab end is derived from the conventional antibody A, and VH_A and VL_A are the heavy chain variable region and the light chain variable region of the antibody A, respectively. The VH end is derived from the heavy-chain antibody B or the heavy-chain antibody C, VH_B is the heavy chain variable region of the heavy-chain antibody B, and VH_C is the heavy chain variable region of the heavy-chain antibody C. CL is the light chain constant region domain. CH1, CH2 and CH3 are the first, second and third domains of the heavy chain constant region, respectively. L1 and L2 are the first and second linker peptides, respectively, and h is a hinge region or derived sequence of an IgG antibody.

### Example 1.4.1. Structure (9): 2×VH-IgG(HC+LC)

[0395] Structure (9) represents a bispecific binding protein comprising two different polypeptide chains: a polypeptide chain 1 or a first polypeptide chain, also known as a short chain, comprising VH_B-L1-VL_A-CL from the amino-terminus to the carboxyl-terminus; and a polypeptide chain 2 or a second polypeptide chain, also known as a long chain, comprising VH_B-L2-VH_A-CH1-h-CH2-CH3 from the amino-terminus to the carboxyl-terminus.

[0396] In one embodiment, VH_B of the polypeptide chain 1 is fusion-linked directly to VL_A, i.e., L1 is 0 in length. In another embodiment, VH_B of the polypeptide chain 1 is linked to VL_A via a linker peptide L1; and L1 may be the sequence listed in Table 1-2.

[0397] In one embodiment, VH_B of the polypeptide chain 2 is fusion-linked directly to VH_A, i.e., L2 is 0 in length. In another embodiment, VH_B of the polypeptide chain 2 is linked to VH_A via a linker peptide L2; and L2 may be the sequence listed in Table 1-2.

[0398] In one embodiment, L1 and L2 may be identical sequences. In another embodiment, L1 and L2 may be different sequences.

### Example 1.4.2. Structure (10): (VH′+VH″)-IgG(HC+LC)

[0399] Structure (10) represents a trispecific binding protein comprising two different polypeptide chains: a polypeptide chain 1 or a first polypeptide chain, also known as a short chain, comprising VH_B-L1-VL_A-CL from the amino-terminus to the carboxyl-terminus; and a polypeptide chain 2 or a second polypeptide chain, also known as a long chain, comprising VH_C-L2-VH_A-CH1-h-CH2-CH3 from the amino-terminus to the carboxyl-terminus.

[0400] In one embodiment, VH_B of the polypeptide chain 1 is fusion-linked directly to VL_A, i.e., L1 is 0 in length. In another embodiment, VH_B of the polypeptide chain 1 is linked to VL_A via a linker peptide L1; and L1 may be the sequence listed in Table 1-2.

[0401] In one embodiment, VH_C of the polypeptide chain 2 is fusion-linked directly to VH_A, i.e., L2 is 0 in length. In another embodiment, VH_C of the polypeptide chain 2 is linked to VH_A via a linker peptide L2; and L2 may be the sequence listed in Table 1-2.

[0402] In one embodiment, L1 and L2 may be identical sequences. In another embodiment, L1 and L2 may be different sequences.

### Example 1.5. Fab-Fc-VH Bivalent Asymmetric Structure

[0403] The present invention provides a method for constructing a bispecific binding protein using two parent monoclonal antibodies: a conventional antibody A binding to a first antigen and a heavy-chain antibody B binding to a second antigen.

[0404] As shown in FIG. 1 (11-13), the Fab end is derived from the conventional antibody A, and VH_A and VL_A are the heavy chain variable region and the light chain variable region of the antibody A, respectively. The VH end is derived from the heavy-chain antibody B, and VH_B is the heavy chain variable region of the heavy-chain antibody B. CL is the light chain constant region domain. CH1, CH2 and CH3 are the first, second and third domains of the heavy chain constant region, respectively. h is a hinge region or derived sequence of an IgG antibody. Different amino acid mutations are introduced into the Fc regions of the two heavy chains to reduce the homodimerization of heavy chains.

[0405] In one embodiment, h in the polypeptide chain containing VH_B may be a hinge region or a hinge region-derived linker peptide sequence of IgG, such as the sequence of human IgG1 hinge (C220S) or G5-LH in Table 1-2.

### Example 1.5.1. Structure (11): Fab-Fc-VH

[0406] The binding protein of structure (11) comprises three different polypeptide chains: a polypeptide chain 1 or a first polypeptide chain, comprising VL_A-CL from the amino-terminus to the carboxyl-terminus; a polypeptide chain 2 or a second polypeptide chain, comprising VH_A-CH1-h-CH2-CH3 from the amino-terminus to the carboxyl-terminus; and a polypeptide chain 3, comprising VH_B-h-CH2-CH3 from the amino-terminus to the carboxyl-terminus.

### Example 1.5.2. Structure (12): Fab(Cross VH/VL)-Fc-VH

[0407] The binding protein of structure (12) comprises three different polypeptide chains: a polypeptide chain 1 or a first polypeptide chain, comprising VH_A-CL from the amino-terminus to the carboxyl-terminus; a polypeptide chain 2 or a second polypeptide chain, comprising VL_A-CH1-h-CH2-CH3 from the amino-terminus to the carboxyl-terminus; and a polypeptide chain 3, comprising VH_B-h-CH2-CH3 from the amino-terminus to the carboxyl-terminus.

### Example 1.5.3. Structure (13): Fab(Cross Fd/LC)-Fc-VH

[0408] The binding protein of structure (13) comprises three different polypeptide chains: a polypeptide chain 1 or a first polypeptide chain, comprising VH_A-CH1 from the amino-terminus to the carboxyl-terminus; a polypeptide chain 2 or a second polypeptide chain, comprising VL_A-CL-h-CH2-CH3 from the amino-terminus to the carboxyl-terminus; and a polypeptide chain 3 or a third polypeptide chain, comprising VH_B-h-CH2-CH3 from the amino-terminus to the carboxyl-terminus.

[0409] In one embodiment, h in the polypeptide chain 2 is a hinge region or a linker peptide, the sequence of which may be the sequence of LH1 in Table 1-2.

### Example 1.6. Fab-Fc-VH(2) Trivalent Asymmetric Structure

[0410] The present invention provides a method for constructing a bispecific binding protein using two parent monoclonal antibodies: a conventional antibody A binding to a first antigen and a heavy-chain antibody B binding to a second antigen.

[0411] The present invention further provides a method for constructing a trispecific binding protein using three parent monoclonal antibodies: a conventional antibody A binding to a first antigen, a heavy-chain antibody B binding to a second antigen, and a heavy-chain antibody C binding to a third antigen.

[0412] As shown in FIG. 1 (14-19), the Fab end is derived from the conventional antibody A, and VH_A and VL_A are the heavy chain variable region and the light chain variable region of the antibody A, respectively. The VH end is derived from the heavy-chain antibody B or the heavy-chain antibody C, VH_B is the heavy chain variable region of the heavy-chain antibody B, and VH_C is the heavy chain variable region of the heavy-chain antibody C. CL is the light chain constant region domain. CH1, CH2 and CH3 are the first, second and third domains of the heavy chain constant region, respectively. L is a linker peptide, and h is a hinge region or derived sequence of an IgG antibody. Different amino acid mutations are introduced into the Fc regions of the two heavy chains to reduce the homodimerization of heavy chains.

[0413] In one embodiment, h in the polypeptide chain containing VH_B may be a hinge region or a hinge region-derived linker peptide sequence of IgG, such as the sequence of human IgG1 hinge (C220S) or G5-LH in Table 1-2.

### Example 1.6.1. Structure (14): Fab-Fc-VH-VH

[0414] Structure (14) represents a bispecific binding protein comprising three different polypeptide chains: a polypeptide chain 1 or a first polypeptide chain, comprising VL_A-CL from the amino-terminus to the carboxyl-terminus; a polypeptide chain 2 or a second polypeptide chain, comprising VH_A-CH1-h-CH2-CH3 from the amino-terminus to the carboxyl-terminus; and a polypeptide chain 3 or a third polypeptide chain, comprising VH_B-L-VH_B-h-CH2-CH3 from the amino-terminus to the carboxyl-terminus.

[0415] In one embodiment, the first VH_B of the polypeptide chain 3 is fusion-linked directly to the second VH_B, i.e., L is 0 in length. In another embodiment, the first VH_B of the polypeptide chain 3 is linked to the second VH_B via a linker peptide L; and L may be the sequence listed in Table 1-2.

### Example 1.6.2. Structure (15): Fab-Fc-VH′-VH″

[0416] Structure (15) represents a trispecific binding protein comprising three different polypeptide chains: a polypeptide chain 1 or a first polypeptide chain, comprising VL_A-CL from the amino-terminus to the carboxyl-terminus; a polypeptide chain 2 or a second polypeptide chain, comprising VH_A-CH1-h-CH2-CH3 from the amino-terminus to the carboxyl-terminus; and a polypeptide chain 3 or a third polypeptide chain, comprising VH_C-L-VH_B-h-CH2-CH3 from the amino-terminus to the carboxyl-terminus.

[0417] In one embodiment, VH_C of the polypeptide chain 3 is fusion-linked directly to VH_B, i.e., L is 0 in length. In another embodiment, VH_C of the polypeptide chain 3 is linked to VH_B via linker peptide L; L may be the sequence listed in Table 1-2.

### Example 1.6.3. Structure (16): Fab(Cross VH/VL)-Fc-VH-VH

[0418] Structure (16) represents a bispecific binding protein comprising three different polypeptide chains: a polypeptide chain 1 or a first polypeptide chain, comprising VH_A-CL from the amino-terminus to the carboxyl-terminus; a polypeptide chain 2 or a second polypeptide chain, comprising VL_A-CH1-h-CH2-CH3 from the amino-terminus to the carboxyl-terminus; and a polypeptide chain 3 or a third polypeptide chain, comprising VH_B-L-VH_B-h-CH2-CH3 from the amino-terminus to the carboxyl-terminus.

[0419] In one embodiment, the first VH_B of the polypeptide chain 3 is fusion-linked directly to the second VH_B, i.e., L is 0 in length. In another embodiment, the first VH_B of the polypeptide chain 3 is linked to the second VH_B via a linker peptide L; and L may be the sequence listed in Table 1-2.

### Example 1.6.4. Structure (17): Fab(Cross VH/VL)-Fc-VH′-VH″

[0420] Structure (17) represents a trispecific binding protein comprising three different polypeptide chains: a polypeptide chain 1 or a first polypeptide chain, comprising VH_A-CL from the amino-terminus to the carboxyl-terminus; a polypeptide chain 2 or a second polypeptide chain, comprising VL_A-CH1-h-CH2-CH3 from the amino-terminus to the carboxyl-terminus; and a polypeptide chain 3 or a third polypeptide chain, comprising VH_C-L-VH_B-h-CH2-CH3 from the amino-terminus to the carboxyl-terminus.

[0421] In one embodiment, VH_C of the polypeptide chain 3 is fusion-linked directly to VH_B, i.e., L is 0 in length. In another embodiment, VH_C of the polypeptide chain 3 is linked to VH_B via linker peptide L; L may be the sequence listed in Table 1-2.

### Example 1.6.5. Structure (18): Fab(Cross Fd/LC)-Fc-VH-VH

[0422] Structure (18) represents a bispecific binding protein comprising three different polypeptide chains: a polypeptide chain 1 or a first polypeptide chain, comprising VH_A-CH1 from the amino-terminus to the carboxyl-terminus; a polypeptide chain 2 or a second polypeptide chain, comprising VL_A-CL-h-CH2-CH3 from the amino-terminus to the carboxyl-terminus; and a polypeptide chain 3 or a third polypeptide chain, comprising VH_B-L-VH_B-h-CH2-CH3 from the amino-terminus to the carboxyl-terminus.

[0423] In one embodiment, the first VH_B of the polypeptide chain 3 is fusion-linked directly to the second VH_B, i.e., L is 0 in length. In another embodiment, the first VH_B of the polypeptide chain 3 is linked to the second VH_B via a linker peptide L; and L may be the sequence listed in Table 1-2.

[0424] In one embodiment, h in the polypeptide chain 2 is a hinge region or a linker peptide, the sequence of which may be the sequence of LH1 in Table 1-2.

### Example 1.6.6. Structure (19): Fab(Cross Fd/LC)-Fc-VH′-VH″

[0425] Structure (19) represents a trispecific binding protein comprising three different polypeptide chains: a polypeptide chain 1 or a first polypeptide chain, comprising VH_A-CH1 from the amino-terminus to the carboxyl-terminus; a polypeptide chain 2 or a second polypeptide chain, comprising VL_A-CL-h-CH2-CH3 from the amino-terminus to the carboxyl-terminus; and a polypeptide chain 3 or a third polypeptide chain, comprising VH_C-L-VH_B-h-CH2-CH3 from the amino-terminus to the carboxyl-terminus.

[0426] In one embodiment, VH_C of the polypeptide chain 3 is fusion-linked directly to VH_B, i.e., L is 0 in length. In another embodiment, VH_C of the polypeptide chain 3 is linked to VH_B via linker peptide L; L may be the sequence listed in Table 1-2.

[0427] In one embodiment, h in the polypeptide chain 2 is a hinge region or a linker peptide, the sequence of which may be the sequence of LH1 in Table 1-2.

### Example 1.7. scFv-Fc-VH Bivalent Asymmetric Structure

[0428] The present invention provides a method for constructing a bispecific binding protein using two parent monoclonal antibodies: a conventional antibody A binding to a first antigen and a heavy-chain antibody B binding to a second antigen.

[0429] As shown in FIG. 1 (20-21), the scFv end is derived from the conventional antibody A, and VH_A and VL_A are the heavy chain variable region and the light chain variable region of the antibody A, respectively. The VH end is derived from the heavy-chain antibody B, and VH_B is the heavy chain variable region of the heavy-chain antibody B. CH2 and CH3 are the second and third domains of the heavy chain constant region, respectively. L is a linker peptide, and h is a hinge region or derived sequence of an IgG antibody. Different amino acid mutations are introduced into the Fc regions of the two heavy chains to reduce the homodimerization of heavy chains.

[0430] In one embodiment, the sequence of the scFv may be VH-linker peptide-VL. In another embodiment, the sequence of the scFv may be VL-linker peptide-VH.

[0431] In one embodiment, L in the polypeptide chain is a linker peptide, and may be the sequence listed in Table 1-2, preferably the sequence of GS_15 or GS_20.

[0432] In one embodiment, h in the polypeptide chain is a hinge region or derived sequence of an IgG antibody, and may be the sequence listed in Table 1-2, preferably the sequence of human IgG1 hinge (C220S) or G5-LH.

### Example 1.7.1. Structure (20): scFv(VL-VH)-Fc-VH

[0433] The binding protein of structure (20) comprises two different polypeptide chains: a polypeptide chain 1 or a first polypeptide chain, comprising VL_A-L-VH_A-h-CH2-CH3 from the amino-terminus to the carboxyl-terminus; and a polypeptide chain 2 or a second polypeptide chain, comprising VH_B-h-CH2-CH3 from the amino-terminus to the carboxyl-terminus.

### Example 1.7.2. Structure (21): scFv(VH-VL)-Fc-VH

[0434] The binding protein of structure (21) comprises two different polypeptide chains: a polypeptide chain 1 or a first polypeptide chain, comprising VH_A-L-VL_A-h-CH2-CH3 from the amino-terminus to the carboxyl-terminus; and a polypeptide chain 2 or a second polypeptide chain, comprising VH_B-h-CH2-CH3 from the amino-terminus to the carboxyl-terminus.

### Example 1.8. scFv-Fc-VH(2) Trivalent Asymmetric Structure

[0435] The present invention provides a method for constructing a bispecific binding protein using two parent monoclonal antibodies: a conventional antibody A binding to a first antigen and a heavy-chain antibody B binding to a second antigen.

[0436] The present invention further provides a method for constructing a trispecific binding protein using three parent monoclonal antibodies: a conventional antibody A binding to a first antigen, a heavy-chain antibody B binding to a second antigen, and a heavy-chain antibody C binding to a third antigen.

[0437] As shown in FIG. 1 (22-25), the scFv end is derived from the conventional antibody A, and VH_A and VL_A are the heavy chain variable region and the light chain variable region of the antibody A, respectively. The VH end is derived from the heavy-chain antibody B or the heavy-chain antibody C, VH_B is the heavy chain variable region of the heavy-chain antibody B, and VH_C is the heavy chain variable region of the heavy-chain antibody C. CH2 and CH3 are the second and third domains of the heavy chain constant region, respectively. L1 and L2 are the first and second linker peptides, respectively, and h is a hinge region or derived sequence of an IgG antibody. Different amino acid mutations are introduced into the Fc regions of the two heavy chains to reduce the homodimerization of heavy chains.

[0438] In one embodiment, the sequence of the scFv may be VH-linker peptide-VL. In another embodiment, the sequence of the scFv may be VL-linker peptide-VH.

[0439] In one embodiment, L1 in the polypeptide chain is a linker peptide linking VH and VL in the scFv, and may be the sequence listed in Table 1-2, preferably the sequence of GS_15 or GS_20.

[0440] In one embodiment, L2 in the polypeptide chain is a linker peptide linking the heavy chain variable regions of the two heavy-chain antibodies, and may be the sequence listed in Table 1-2. In another embodiment, the heavy chain variable regions of the two heavy-chain antibodies are directly fused, i.e., L2 is 0 in length.

[0441] In one embodiment, h in the polypeptide chain is a hinge region or derived sequence of an IgG antibody, and may be the sequence listed in Table 1-2, preferably the sequence of human IgG1 hinge (C220S) or G5-LH.

### Example 1.8.1. Structure (22): scFv(VL-VH)-Fc-VH-VH

[0442] Structure (22) represents a bispecific binding protein comprising two different polypeptide chains: a polypeptide chain 1 or a first polypeptide chain, comprising VL_A-L1-VH_A-h-CH2-CH3 from the amino-terminus to the carboxyl-terminus; and a polypeptide chain 2 or a second polypeptide chain, comprising VH_B-L2-VH_B-h-CH2-CH3 from the amino-terminus to the carboxyl-terminus.

[0443] In one embodiment, a first VH_B of the polypeptide chain 2 is fusion-linked directly to a second VH_B, i.e., L2 is 0 in length. In another embodiment, a first VH_B of the polypeptide chain 2 is linked to a second VH_B via a linker peptide L2; and L2 may be the sequence listed in Table 1-2.

### Example 1.8.2. Structure (23): scFv(VH-VL)-Fc-VH-VH

[0444] Structure (23) represents a bispecific binding protein comprising two different polypeptide chains: a polypeptide chain 1 or a first polypeptide chain, comprising VH_A-L1-VL_A-h-CH2-CH3 from the amino-terminus to the carboxyl-terminus; and a polypeptide chain 2 or a second polypeptide chain, comprising VH_B-L2-VH_B-h-CH2-CH3 from the amino-terminus to the carboxyl-terminus.

[0445] In one embodiment, a first VH_B of the polypeptide chain 2 is fusion-linked directly to a second VH_B, i.e., L2 is 0 in length. In another embodiment, a first VH_B of the polypeptide chain 2 is linked to a second VH_B via a linker peptide L2; and L2 may be the sequence listed in Table 1-2.

### Example 1.8.3. Structure (24): scFv(VL-VH)-Fc-VH′-VH″

[0446] Structure (24) represents a trispecific binding protein comprising two different polypeptide chains: a polypeptide chain 1 or a first polypeptide chain, comprising VL_A-L1-VH_A-h-CH2-CH3 from the amino-terminus to the carboxyl-terminus; and a polypeptide chain 2 or a second polypeptide chain, comprising VH_C-L2-VH_B-h-CH2-CH3 from the amino-terminus to the carboxyl-terminus.

[0447] In one embodiment, VH_C of the polypeptide chain 2 is fusion-linked directly to VH_B, i.e., L2 is 0 in length. In another embodiment, VH_C of the polypeptide chain 2 is linked to VH_B via a linker peptide L2; and L2 may be the sequence listed in Table 1-2.

### Example 1.8.4. Structure (25): scFv(VH-VL)-Fc-VH′-VH″

[0448] Structure (25) represents a trispecific binding protein comprising two different polypeptide chains: a polypeptide chain 1 or a first polypeptide chain, comprising VH_A-L1-VL_A-h-CH2-CH3 from the amino-terminus to the carboxyl-terminus; a polypeptide chain 2 or a second polypeptide chain, comprising VH_C-L2-VH_B-h-CH2-CH3 from the amino-terminus to the carboxyl-terminus.

[0449] In one embodiment, VH_C of the polypeptide chain 2 is fusion-linked directly to VH_B, i.e., L2 is 0 in length. In another embodiment, VH_C of the polypeptide chain 2 is linked to VH_B via a linker peptide L2; and L2 may be the sequence listed in Table 1-2.

### Example 1.9. Fab-Fc-VH(3) Tetravalent Asymmetric Structure

[0450] The present invention provides a method for constructing a bispecific binding protein using two parent monoclonal antibodies: a conventional antibody A binding to a first antigen and a heavy-chain antibody B binding to a second antigen.

[0451] The present invention further provides a method for constructing a trispecific binding protein using three parent monoclonal antibodies: a conventional antibody A binding to a first antigen, a heavy-chain antibody B binding to a second antigen, and a heavy-chain antibody C binding to a third antigen.

[0452] The present invention further provides a method for constructing a tetraspecific binding protein using four parent monoclonal antibodies: a conventional antibody A binding to a first antigen, a heavy-chain antibody B binding to a second antigen, a heavy-chain antibody C binding to a third antigen, and a heavy-chain antibody D binding to a fourth antigen.

[0453] As shown in FIG. 1 (26-27), the Fab end is derived from the conventional antibody A, and VH_A and VL_A are the heavy chain variable region and the light chain variable region of the antibody A, respectively. The VH end is derived from the heavy-chain antibody B, the heavy-chain antibody C or the heavy-chain antibody D, VH_B is the heavy chain variable region of the heavy-chain antibody B, VH_C is the heavy chain variable region of the heavy-chain antibody C, and VH_D is the heavy chain variable region of the heavy-chain antibody D. CL is the light chain constant region domain. CH1, CH2 and CH3 are the first, second and third domains of the heavy chain constant region, respectively. L1 and L2 are linker peptides, and h is a hinge region or derived sequence of an IgG antibody. Different amino acid mutations are introduced into the Fc regions of the two heavy chains to reduce the homodimerization of heavy chains.

[0454] In one embodiment, h in the polypeptide chain containing VH_B may be a hinge region or a hinge region-derived linker peptide sequence of IgG, such as the sequence of human IgG1 hinge (C220S) or G5-LH in Table 1-2.

### Example 1.9.1. Structure (26): Fab-Fc-VH-VH-VH

[0455] Structure (26) represents a bispecific binding protein comprising three different polypeptide chains: a polypeptide chain 1 or a first polypeptide chain, comprising VL_A-CL from the amino-terminus to the carboxyl-terminus; a polypeptide chain 2 or a second polypeptide chain, comprising VH_A-CH1-h-CH2-CH3 from the amino-terminus to the carboxyl-terminus; and a polypeptide chain 3 or a third polypeptide chain, comprising VH_B-L1-VH_B-L2-VH_B-h-CH2-CH3 from the amino-terminus to the carboxyl-terminus.

[0456] In one embodiment, the first VH_B of the polypeptide chain 3 is fusion-linked directly to the second VH_B, i.e., L1 is 0 in length. In another embodiment, a first VH_B of the polypeptide chain 3 is linked to a second VH_B via a linker peptide L1; and L1 may be the sequence listed in Table 1-2.

[0457] In one embodiment, a second VH_B of the polypeptide chain 3 is fusion-linked directly to a third VH_B, i.e., L2 is 0 in length. In another embodiment, a second VH_B of the polypeptide chain 3 is linked to a third VH_B via a linker peptide L2; and L2 may be the sequence listed in Table 1-2.

### Example 1.9.2. Structure (27): Fab-Fc-VH′-VH″-VH′″

[0458] Structure (27) represents a tetraspecific binding protein comprising three different polypeptide chains: a polypeptide chain 1 or a first polypeptide chain, comprising VL_A-CL from the amino-terminus to the carboxyl-terminus; a polypeptide chain 2 or a second polypeptide chain, comprising VH_A-CH1-h-CH2-CH3 from the amino-terminus to the carboxyl-terminus; and a polypeptide chain 3 or a third polypeptide chain, comprising VH_D-L1-VH_C-L2-VH_B-h-CH2-CH3 from the amino-terminus to the carboxyl-terminus.

[0459] In one embodiment, VH_D of the polypeptide chain 3 is fusion-linked directly to VH_C, i.e., L1 is 0 in length. In another embodiment, VH_D of the polypeptide chain 3 is linked to VH_C via a linker peptide L1; and L1 may be the sequence listed in Table 1-2.

[0460] In one embodiment, VH_C of the polypeptide chain 3 is fusion-linked directly to VH_B, i.e., L2 is 0 in length. In another embodiment, VH_C of the polypeptide chain 3 is linked to VH_B via linker peptide L2; and L2 may be the sequence listed in Table 1-2.

### Example 2. Sequence Analysis, Expression and Purification, and Characterization and Analysis of Physicochemical Properties of Antibodies

### Example 2.1. Sequence Analysis and Optimization of Antibodies

[0461] The sequences of the heavy chain variable domain of the antibody are derived from events such as gene rearrangements of germline gene V, D and J segments of heavy chain gene clusters and somatic hypermutations on chromosomes; the sequences of the light chain variable domain are derived from the events such as gene rearrangements of germline gene V, D and J segments of light chain gene clusters and somatic hypermutations. Gene rearrangement and somatic hypermutation are major factors in increasing antibody diversity. Antibodies derived from the same germline V gene segment may also produce different sequences, but with relatively high similarity overall. The germline gene segments that are likely to undergo gene rearrangement can be deduced from the antibody variable domain sequences using algorithms such as IMGT/DomainGapAlign (http://imgt.org/3Dstructure-DB/cgi/DomainGapAlign.cgi) or NCBI/IgBLAST (https://www.ncbi.nlm.nih.gov/igblast/).

[0462] Chemical modifications, sometimes introduced after amino acid chains of a protein or polypeptide is translated and synthesized in a cell, are called post-translational modifications (PTMs). For antibodies, some PTM sites are very conservative. For example, the conservative amino acid asparagine (Asn) at position 297 (EU numbering) of the constant domain of the human IgG1 antibody is often glycosylated to form a saccharide chain whose structure is critical for antibody structure and associated effector functions. However, PTMs may have a greater effect on antigen binding or result in changes in the physicochemical properties of the antibody, if they are present in the variable domains, particularly in the antigen binding regions (e.g., CDRs) of an antibody. For example, glycosylation, deamidation, isomerization, oxidation, and the like may increase the instability or heterogeneity of antibody molecules, thereby increasing the difficulty and risk of antibody development. Thus, it is very important for the development of therapeutic antibodies to avoid some potential PTMs. As experience has accumulated, it has been found that some PTMs are highly correlated with the composition of amino acid sequences, especially the “pattern” of the composition of adjacent amino acids, which makes it possible to predict potential PTMs from the primary amino acid sequences of a protein. For example, it can be predicted that there is an N-linked glycosylation site from the N-x-S/T sequence pattern (asparagine at the first position, any amino acid other than non-proline at the second position, and serine or threonine at the third position). The amino acid sequence patterns leading to PTMs may be derived from germline gene sequences, e.g., the human germline gene fragment IGHV3-33 naturally having a glycosylation pattern NST in the FR3 region; or they may also be derived from somatic hypermutations. For example, NGS or NLT may be a glycosylation site, NS may be a deamidation site, and DG may cause isomerization of aspartic acid.

[0463] The amino acid sequence patterns of PTMs may be disrupted by amino acid mutations, thereby reducing or eliminating the formation of specific PTMs. There are different methods for designing mutations depending on the antibody sequences and PTM sequence patterns. One method is to replace a “hot spot” amino acid (e.g., N or S in the NS pattern) with an amino acid with similar physicochemical properties (e.g., to mutate N into Q). If the PTM sequence pattern is derived from somatic hypermutations and is not present in the germline gene sequence, the other method can be to replace the sequence pattern with the corresponding germline gene sequence. In practice, a variety of methods for designing mutations may be used for the same PTM sequence pattern.

### Example 2.2. Expression and Purification of Antibodies

[0464] In this example, a general method for preparing antibodies in mammalian host cells (e.g., human embryonic kidney cell HEK293 or Chinese hamster ovary CHO cells and derived cells thereof) by such techniques as transient transfection and expression, and affinity capture and separation is described. This method is applicable to an antibody of interest comprising an Fc region. The antibody of interest may consist of one or more protein polypeptide chains, and may be derived from one or more expression plasmids.

[0465] The amino acid sequences of the polypeptide chains of the antibody were converted into nucleotide sequences by codon optimization. The encoding nucleotide sequences were synthesized and cloned into expression vectors compatible with the host cell. The mammalian host cells were transfected simultaneously with plasmids encoding the polypeptide chains of the antibody in a particular ratio, and the recombinant antibody with correct folding and assembly of polypeptide chains could be obtained by the conventional recombinant protein expression and purification techniques. Specifically, FreeStyle™ 293-F cells (Thermo, #R79007) were expanded in FreeStyle™ F17 Expression Medium (Thermo, #A1383504). Before transient transfection, the cells were adjusted to a concentration of 6-8×10⁵ cells/mL, and cultured in a shaker at 37° C. with 8% CO₂ for 24 h to make a concentration of 1.2×10⁶ cells/mL. 30 mL of cultured cells were taken. Plasmids encoding the polypeptide chains of the antibody were mixed in a certain ratio, and a total of 30 μg of the plasmids (the ratio of the plasmids to cells was 1 μg:1 mL) were dissolved in 1.5 mL of Opti-MEM reduced serum medium (Thermo, #31985088). The resulting mixture was filtered through a 0.22 μm filter membrane for sterilization. Then, 1.5 mL of Opti-MEM was dissolved in 120 μL of 1 mg/mL PEI (Polysciences, #23966-2), and the mixture was left to stand for 5 min PEI was slowly added to the plasmids, and the mixture was incubated at room temperature for 10 min. The mixed solution of plasmids and PEI was slowly added dropwise while shaking the culture flask, and the cells were cultured in a shaker at 37° C. with 8% CO₂ for 5 days. Cell viability was measured after 5 days. The culture was collected and centrifuged at 3300 g for 10 min, and then the supernatant was collected and centrifuged at high speed to remove impurities. A gravity column (Bio-Rad, #7311550) containing MabSelect™ (GE Healthcare, #71-5020-91) was equilibrated with a PBS buffer (pH 7.4) and rinsed with 2-5 column volumes of PBS. The column was loaded with the supernatant sample, and rinsed with 5-10 column volumes of PBS buffer, followed by 0.1 M glycine at pH 3.5 to elute the target protein. The eluate was adjusted to neutrality with Tris-HCl at pH 8.0, and concentrated and buffer exchanged into PBS buffer or a buffer with other components with an ultrafiltration tube (Millipore, #UFC901024) to obtain a purified solution of the recombinant antibody. Finally, the purified antibody solution was determined for concentration using NanoDrop (Thermo, NanoDrop™ One), subpackaged and stored for later use.

### Example 2.3. Analysis of Protein Purity and Polymers by SEC-HPLC

[0466] In this example, analytical size-exclusion chromatography (SEC) was used to analyze the protein sample for purity and polymer form. An analytical chromatography column TSKgel G3000SW×1 (Tosoh Bioscience, #08541, 5 μm, 7.8 mm×30 cm) was connected to a high-pressure liquid chromatograph HPLC (Agilent Technologies, Agilent 1260 Infinity II) and equilibrated with a PBS buffer at room temperature for at least 1 h. A proper amount of the protein sample (at least 10 μg) was filtered through a 0.22 μm filter membrane and then injected into the system, and an HPLC program was set: the sample was passed through the chromatography column with a PBS buffer at a flow rate of 1.0 mL/min for a maximum of 25 min. An analysis report was generated by the HPLC, with the retention time of the components with different molecular sizes in the sample reported.

[0467] FIG. 65 showed the analysis results of SDS-PAGE and SEC-HPLC of protein samples obtained by transient transfection and expression and one-step affinity purification of several bispecific antibody molecules of different structures in the present application. All of those bispecific antibody molecules showed good yield and purity.

### Example 2.4. Determination of Thermostability of Protein Molecules by DSF

[0468] Differential scanning fluorimetry (DSF) is a commonly used high-throughput method for determining the thermostability of proteins. In this method, changes in the fluorescence intensity of the dye that binds to unfolded protein molecules were monitored using a real-time quantitative fluorescence PCR instrument to reflect the denaturation process of the protein and thus to reflect the thermostability of the protein. In this example, the thermal denaturation temperature (Tm) of a protein molecule was measured by DSF. 10 μg of protein was added to a 96-well PCR plate (Thermo, #AB-0700/W), followed by the addition of 2 μL of 100× diluted dye SYPRO™ (Invitrogen, #2008138), and then the mixture in each well was brought to a final volume of 40 μL by adding buffer. The PCR plate was sealed, placed in a real-time quantitative fluorescence PCR instrument (Bio-Rad CFX96 PCR System), and incubated at 25° C. for 5 min, then at a temperature gradually increased from 25° C. to 95° C. at a gradient of 0.2° C./0.2 min, and at a temperature decreased to 25° C. at the end of the test. The FRET scanning mode was used and data analysis was performed using Bio-Rad CFX Maestro software to calculate the Tm of the sample.

### Example 2.5. Determination of Molecular Stability and Molecular Aggregation of Proteins by Uncle

[0469] Uncle (Unchained Labs) is a multifunctional one-stop protein stability analysis platform that characterizes protein stability by total fluorescence, static light scattering (SLS) and dynamic light scattering (DLS) assay methods. The parameters of melting temperature (Tm), aggregation temperature (Tagg) and particle size (diameter) can be obtained simultaneously for the same group of samples. In this example, a “Tm & Tagg with optional DLS” application of Uncle was selected for the determination. 9 μL of sample was added to a Uni tube, and the temperature was set to gradually increase from 25° C. to 95° C. at a gradient of 0.3° C./min. Four acquisitions of data were performed at the beginning and end of DLS assay, each for 5 s. After the experimental run was finished, the Tm value of each sample was calculated according to a barycentric mean (BCM) formula using the Uncle analysis software, the Tagg value was calculated from a curve (aggregation curve) of fluorescence intensity of SLS at the wavelength of 266 nm or 473 nm, and the particle size and dispersion of the samples were calculated from DLS related functions.

### Example 3. PD-L1×CTLA4 Bispecific Antibodies

### Example 3.1. Background

[0470] Programmed death receptor 1 (PD-1) is mainly expressed in immune cells such as T cells. It has two ligands, i.e., programmed death ligand 1 (PD-L1) and PD-L2. PD-L1 is mainly expressed in antigen-presenting cells and a variety of tumor cells. The interaction between PD-L1 and PD-1 can down-regulate the activity of T cells, reduce the secretion of cytokines and play a role in immunosuppression. The expression of the PD-L1 protein can be detected in many human tumor tissues. The microenvironment at the tumor site can induce the expression of PD-L1 on tumor cells, and the expressed PD-L1 facilitates the occurrence and growth of tumors, induces the apoptosis of anti-tumor T cells and further protects the tumor cells from immune attack. The PD-1/PD-L1 pathway inhibitor can block the binding of PD-1 to PD-L1, block negative regulation signals, restore the activity of T cells, and play a role in killing tumor cells, thereby inhibiting tumor growth. Therefore, the immunoregulation targeting PD-1/PD-L1 is of great significance for tumor growth inhibition.

[0471] Cytotoxic T lymphocyte-associated antigen 4 (CTLA4) is a negative regulator expressed on T cells. After binding to CD80 or CD86 on antigen presenting cells, the CTLA4 blocks the co-stimulatory signal of CD28 and simultaneously down-regulates the activity of T cells, thereby playing a role in immunosuppression. CTLA4-mediated inhibition mechanisms are often responsible for the escape of tumor cells from the immune system. By blocking the interaction between CTLA4 and its ligand, the activity of T cells can be restored, and the anti-tumor ability can be enhanced.

[0472] At present, blocking antibodies against PD-1, PD-L1 and CTLA4 all show excellent anti-tumor effects in the clinic, and a plurality of antibody drugs are approved for marketing. Nevertheless, those drugs and treatments still face many clinical challenges, such as low response rates. Therefore, many clinical trials based on the combination regimens of blocking antibodies such as PD-1, PD-L1 and CTLA4 are actively underway. Since the CTLA4 inhibitor shows significant toxic and side effects, in the existing combination regimens of the PD-1/PD-L1 inhibitor and the CTLA4 inhibitor, the CTLA4 inhibitor is usually selected at a lower dose. For example, in a clinical trial of a combination of the anti-PD-1 antibody nivolumab and the anti-CTLA-4 antibody ipilimumab in the treatment of colorectal cancer and renal cell carcinoma, nivolumab and ipilimumab are at doses of 3 mg/kg and 1 mg/kg, respectively. In a clinical trial of a combination of the anti-PD-L1 antibody durvalumab, and the anti-CTLA-4 antibody tremelimumab in the treatment of non-small cell lung cancer, durvalumab and tremelimumab are at doses of 10-20 mg/kg and 1 mg/kg, respectively.

[0473] In another aspect, there is a growing understanding of the biological mechanisms related to tumor immunity. It has been found that blocking the CTLA4 signaling pathway will lead to high expression of PD-1 on tumor infiltrating lymphocytes (TILs), and blocking the PD-1 signaling pathway will up-regulate the expression of CTLA4 on TILs (Rev Assoc Med Bras 2017; 63(9): 814-823). This suggests that there may be a drug resistance mechanism induced by blocking a single co-inhibitory signaling pathway, whereas by combining those antibodies to block multiple co-inhibitory signaling pathways simultaneously, there may be a synergistic effect on T cell activation. Moreover, the latest study reported a new mechanism of interaction between PD-1 and CTLA4 signaling pathways, illustrating a synergistic effect of PD-L1 and CTLA4 antibodies (Zhao et al, 2019, Immunity 51, 1059-1073).

[0474] Based on the existing knowledge, we believe that bispecific antibodies targeting both PD-L1 and CTLA4 can improve anti-tumor efficacy and safety by one or more mechanisms of action. Firstly, the PD-L1×CTLA4 bispecific antibody activates T cells at different stages by blocking the CTLA4 signaling pathway and PD-1/PD-L1 signaling pathway; the cis interaction of PD-L1 and CD80 allows for a better synergy with CTLA4. Secondly, PD-L1 is highly expressed in tumor tissues, and the PD-L1×CTLA4 bispecific antibody can specifically remove CTLA4 inhibition signals in a tumor microenvironment to activate T cells and reduce toxic and side effects caused by non-specific activation of CTLA4 monoclonal antibodies in a peripheral system. Thirdly, the PD-L1×CTLA4 bispecific antibody can selectively retain Fc effector function (e.g., ADCC), thereby specifically killing inhibitory T cells highly expressing CTLA4 such as Treg cells by CTLA4 or specifically killing tumor cells highly expressing PD-L1 by PD-L1 in a tumor microenvironment. In addition, the bispecific antibody, as a drug product, is more advantageous in terms of economy and convenience of administration than the combination of two drug products.

### Example 3.2. Acquisition of Anti-PD-L1 IgG Antibodies and Anti-CTLA4 HCAb Antibodies

### Example 3.2.1. Acquisition of Fully Human Anti-PD-L1 IgG Antibodies

[0475] The Harbour H2L2 mouse (Harbour Antibodies BV) is a transgenic mouse carrying an immune repertoire of human immunoglobulins that produces antibodies with intact human antibody variable domains and rat constant domains.

[0476] Harbour H2L2 mice were subjected to multiple rounds of immunization with a soluble recombinant human PD-L1 protein (NovoProtein, #CM06). When the titer of the PD-L1-specific antibody in the serum of mice was detected to reach a certain level, spleen cells of the mice were taken and fused with a myeloma cell line to obtain hybridoma cells. After multiple rounds of screening and cloning of the hybridoma cells, several monoclonal antibody molecules specifically recognizing PD-L1 were identified. Those monoclonal antibodies were further identified, and several candidate antibody molecules were preferentially selected according to parameters such as the binding ability to human PD-L1, the binding ability to cynomolgus monkey PD-L1, and the ability to inhibit the binding of PD-L1 to PD-1. The candidate antibody molecules were then subjected to sequence analysis and optimization to obtain several variant sequences. The VL and VH sequences of the antibody were fused to the corresponding human κ light chain constant region and IgG1 heavy chain constant region sequences and expressed to obtain recombinant fully human antibody molecules. The recombinant fully human anti-PD-L1 IgG antibodies are listed in Table 3-9.

### Example 3.2.2. Acquisition of Fully Human Anti-CTLA4 HCAb Antibodies

[0477] The Harbour HCAb mouse (Harbour Antibodies BV, WO2010/109165A2) is a transgenic mouse carrying an immune repertoire of human immunoglobulins, capable of producing heavy chain-only antibodies that are only half the size of conventional IgG antibodies. The antibodies produced have only human antibody heavy chain variable domains and mouse Fc constant domains.

[0478] Harbour HCAb mice were subjected to multiple rounds of immunization with a soluble recombinant human CTLA4 protein (ACRO Biosystems, #CT4-H5229). When the titer of the CTLA4-specific antibody in the serum of mice was detected to reach a certain level, spleen cells of the mice were taken, from which B cells were isolated, and the CD138-positive plasma cells were sorted using a mouse plasma cell isolation kit (Miltenyi, #130-092-530). The human VH gene was amplified from plasma cells using conventional molecular biology techniques, and the amplified human VH gene fragments were constructed into mammalian cell expression plasmid pCAG vectors encoding the sequence of the heavy chain Fc region of the human IgG1 antibody. Mammal host cells (e.g., human embryonic kidney cell HEK293) were transfected with the plasmids and allowed to express antibodies to obtain a supernatant with fully human HCAb antibodies. Positive HCAb antibodies were identified by testing the supernatant with HCAb antibodies for binding to recombinant human CTLA4 proteins by ELISA. Those HCAb antibodies were further identified, and several candidate HCAb antibody molecules were preferentially selected according to parameters such as the binding ability to human CTLA4, the binding ability to cynomolgus monkey CTLA4, and ability to inhibit the binding of CTLA4 to B7-1. The candidate HCAb antibody molecules were then subjected to sequence analysis and optimization to obtain several variant sequences. The VH sequence of the HCAb antibody and the Fc sequence of the heavy chain of human IgG1 were fused and expressed to obtain fully human recombinant HCAb antibody molecules. The recombinant fully human anti-CTLA4 HCAb antibodies are listed in Table 3-9.

### Example 3.3. Construction of Bispecific Antibody Molecules Using Anti-PD-L1 IgG Antibodies and Anti-CTLA4 HCAb Antibodies

[0479] In this example, PD-L1×CTLA4 bispecific antibody molecules of a variety of structures were constructed using the antigen-binding domain Fab of the anti-PD-L1 IgG antibody PR000070 or PR000265 and the antigen-binding domain VH of the anti-CTLA4 HCAb antibody PR000184.

[0480] In this and subsequent examples, the anti-PD-L1 IgG monoclonal antibody PR000070, PR000416 or PR000265 was used as an anti-PD-L1 positive control molecule, and was also the parent monoclonal antibody of the PD-L1 end of the PD-L1×CTLA4 bispecific antibody molecule. PR000070, PR000265 and PR000416 are all derived from the same anti-PD-L1 monoclonal antibody. PR000070 and PR000265 are both human IgG1 subtypes and both have an N297A mutation in their Fc regions, the only difference between which was that PR000265 had one amino acid mutation in the heavy chain variable region VH. PR000265 and PR000416 are both human IgG1 subtypes and have identical Fab structures, the only difference between which was that PR000265 had an N297A mutation in the Fc region.

[0481] In this and subsequent examples, the anti-CTLA4 HCAb monoclonal antibody PR000184 was used as an anti-CTLA4 positive control molecule, and was also the parent monoclonal antibody of the CTLA4 end of the PD-L1×CTLA4 bispecific antibody molecule.

### Example 3.3.1. Construction of Molecules of Fab-HCAb Symmetric Structures

[0482] PD-L1×CTLA4 bispecific antibody molecules of Fab-HCAb symmetric structures were designed according to the structures described in Example 1.1 using anti-PD-L1 IgG antibodies and anti-CTLA4 heavy-chain antibodies, with the results summarized in Table 3-1. The antibody molecule samples were prepared and analyzed according to the method described in Example 2, with the results summarized in Table 3-2.

TABLE 3-1
PD-L1×CTLA4 bispecific antibody molecules of Fab-HCAb symmetric structures

| | | | | | Second linker | |
|---|---|---|---|---|---|---|
| | | | | First linker | peptide | |
| | Bispecific | PD-L1 | CTLA4 | peptide | (between | |
| Structure | antibody | Antibody | Antibody | (between Fab | VH_B and | Fc type |
| No. | molecules | (Fab) | (VH_B) | and VH_B) | CH2) | (mutation) |
| 1 | PR000403 | PR000265 | PR000184 | None | Human IgG1 | Human IgG1 |
| | | | | | hinge | (L234A, |
| | | | | | | L235A, and |
| | | | | | | P329G) |
| 1 | PR000404 | PR000265 | PR000184 | None | Human IgG1 | Human IgG1 |
| | | | | | hinge | |

TABLE 3-2
Expression of PD-L1 × CTLA4 bispecific antibody
molecule proteins of Fab-HCAb symmetric structures

| | | | Plasmid | | |
|---|---|---|---|---|---|
| | Bispecific | | transfection ratio | Yield (mg/L) | |
| Structure | antibody | Expression system | (short chain:long | after first | SEC-HPLC |
| No. | molecules | and volume | chain) | purification | purity (%) |
| 1 | PR000403 | HEK293-F (30 ml) | 3:2 | 32.00 | 97.57 |
| 1 | PR000404 | HEK293-F (30 ml) | 3:2 | 19.67 | 97.02 |

### Example 3.3.2. Construction of Molecules of IgG-VH Tetravalent Symmetric Structure

[0483] PD-L1×CTLA4 bispecific antibody molecules of IgG-VH tetravalent symmetric structures were designed according to the structures described in Example 1.2 using anti-PD-L1 IgG antibodies and anti-CTLA4 heavy-chain antibodies, with the results summarized in Table 3-3. The antibody molecule samples were prepared and analyzed according to the method described in Example 2, with the results summarized in Table 3-4.

TABLE 3-3
PD-L1×CTLA4 bispecific antibody molecules of IgG-VH tetravalent symmetric structures

| | Bispecific | PD-L1 | CTLA4 | VH B | | |
|---|---|---|---|---|---|---|
| Structure | antibody | Antibody | Antibody | position | Linker | Fc type |
| No. | molecules | (IgG) | (VH_B) | relative to IgG | peptide | (mutation) |
| 3 | PR000300 | PR000070 | PR000184 | N-terminus of | KL-H1_15-RT | Human IgG1 |
| | | | | heavy chain | | |
| 4 | PR000301 | PR000070 | PR000184 | N-terminus of | KL-H1_15-RT | Human IgG1 |
| | | | | light chain | | |
| 6 | PR000302 | PR000070 | PR000184 | C-terminus of | H1 15 | Human IgG1 |
| | | | | light chain | | |
| 5 | PR000303 | PR000070 | PR000184 | C-terminus of | L-H1_15-RT | Human IgG1 |
| | | | | heavy chain | | |
| 5 | PR000401 | PR000265 | PR000184 | C-terminus of | L-H1_15-RT | Human IgG1 |
| | | | | heavy chain | | (L234A, |
| | | | | | | L235A, P329G) |
| 5 | PR000402 | PR000265 | PR000184 | C-terminus of | L-GS_15-RT | Human IgG1 |
| | | | | heavy chain | | (L234A, |
| | | | | | | L235A, P329G) |
| 3 | PR001573 | PR000265 | PR000184 | N-terminus of | KL-H1_15-RT | Human IgG1 |
| | | | | heavy chain | | |
| 3 | PR001576 | PR000265 | PR000184 | N-terminus of | KL-H1_15-RT | Human IgG1 |
| | | | | heavy chain | | (S239D, I332E) |
| 4 | PR001574 | PR000265 | PR000184 | N-terminus of | KL-H1_15-RT | Human IgG1 |
| | | | | light chain | | |
| 4 | PR001577 | PR000265 | PR000184 | N-terminus of | KL-H1_15-RT | Human IgG1 |
| | | | | light chain | | (S239D, I332E) |

TABLE 3-4
Expression of PD-L1 × CTLA4 bispecific antibody molecule
proteins of IgG-VH tetravalent symmetric structures

| | Bispecific | | Yield (mg/L) | |
|---|---|---|---|---|
| Structure | antibody | Expression system | after first | SEC-HPLC |
| No. | molecules | and volume | purification | purity (%) |
| 3 | PR000300 | HEK293-F (30 ml) | 27.33 | 100.0 |
| 4 | PR000301 | HEK293-F (30 ml) | 20.64 | 100.0 |
| 6 | PR000302 | HEK293-F (30 ml) | 29.11 | 100.0 |
| 5 | PR000303 | HEK293-F (30 ml) | 42.57 | 100.0 |
| 5 | PR000401 | HEK293-F (30 ml) | 2.67 | 96.77 |
| 5 | PR000402 | HEK293-F (30 ml) | 5.33 | 96.41 |
| 3 | PR001573 | HEK293-F (50 ml) | 20.00 | 100.0 |
| 3 | PR001576 | HEK293-F (50 ml) | 0.4 | n.d. |
| 4 | PR001574 | HEK293-F (30 ml) | 20.00 | 100.0 |
| 4 | PR001577 | HEK293-F (30 ml) | 26.00 | 100.0 |

### Example 3.3.3. Construction of Molecules of 2×VH-IgG Hexavalent Symmetric Structures

[0484] PD-L1×CTLA4 bispecific antibody molecules of 2×VH-IgG hexavalent symmetric structures were designed according to the structures described in Example 1.4 using anti-PD-L1 IgG antibodies and anti-CTLA4 heavy-chain antibodies, with the results summarized in Table 3-5. The antibody molecule samples were prepared and analyzed according to the method described in Example 2, with the results summarized in Table 3-6.

TABLE 3-5
PD-L1×CTLA4 bispecific antibody molecules of 2×VH-IgG hexavalent symmetric structures

| | | | | First linker | Second linker | |
|---|---|---|---|---|---|---|
| | | | | peptide | peptide | |
| | Bispecific | PD-L1 | CTLA4 | (between | (between | |
| Structure | antibody | Antibody | Antibody | VH_B and | VH_B and | Fc type |
| No. | molecules | (IgG) | (VH_B) | VL_A) | VHL_A) | (mutation) |
| 9 | PR001572 | PR000070 | PR000184 | KL-H1_15-RT | KL-H1_15-RT | Human IgG1 |
| 9 | PR001575 | PR000265 | PR000184 | KL-H1_15-RT | KL-H1_15-RT | Human IgG1 |
| 9 | PR001578 | PR000265 | PR000184 | KL-H1_15-RT | KL-H1_15-RT | Human IgG1 |
| | | | | | | (S239D, I332E) |

TABLE 3-6
Expression of PD-L1 × CTLA4 bispecific antibody molecule proteins
of 2 × VH-IgG hexavalent symmetric structures

| | Bispecific | | Yield (mg/L) | |
|---|---|---|---|---|
| Structure | antibody | Expression system | after first | SEC-HPLC |
| No. | molecules | and volume | purification | purity (%) |
| 9 | PR001572 | HEK293-F (30 ml) | 3.7 | n.d. |
| 9 | PR001575 | HEK293-F (30 ml) | 5 | 100 |
| 9 | PR001578 | HEK293-F (30 ml) | 4.3 | 100 |

### Example 3.3.4. Construction of Molecules of Fab-Fc-VH Bivalent Asymmetric Structures

[0485] PD-L1×CTLA4 bispecific antibody molecules of Fab-Fc-VH bivalent asymmetric structures were designed according to the structures described in Example 1.4 using anti-PD-L1 IgG antibodies and anti-CTLA4 heavy-chain antibodies, with the results summarized in Table 3-7. The antibody molecule samples were prepared and analyzed according to the method described in Example 2, with the results summarized in Table 3-8.

TABLE 3-7
PD-L1×CTLA4 bispecific antibody molecules of Fab-Fc-VHI bivalent asymmetric structures

| | Bispecific | PD-L1 | CTLA4 | Structure | | Fc type of |
|---|---|---|---|---|---|---|
| Structure | antibody | Antibody | Antibody | of Fab | Fc type of Fab | VH_B end |
| No. | molecules | (Fab) | (VH_B) | enc | end (mutation) | (mutation) |
| 11 | PR001609 | PR000265 | PR000184 | Normal | Human IgG1 | Human IgG1 |
| | | | | | (knob) | (hole) |
| 11 | PR001610 | PR000265 | PR000184 | Normal | Human IgG1 | Human IgG1 |
| | | | | | (knob, DE) | (hole, DE) |

[0486] (mutation code: Knob: S354C, T366W; Hole: Y349C, T366S, L368A, Y407V; DE: S239D, I332E.)

TABLE 3-8
Expression of PD-L1 × CTLA4 bispecific antibody molecule
proteins of Fab-Fc-VH bivalent asymmetric structures

| | Bispecific | | Plasmid | Yield (mg/L) | |
|---|---|---|---|---|---|
| Structure | antibody | Expression system | transfection ratio | after first | SEC-HPLC |
| No. | molecules | and volume | (chain 1:2:3) | purification | purity (%) |
| 11 | PR001609 | HEK293-F (30 ml) | 1:1:1 | 40 | 98.27 |
| 11 | PR001610 | HEK293-F (30 ml) | 1:1:1 | 12.33 | 95.68 |

### Example 3.3.5. Sequences of PD-L1×CTLA4 Bispecific Antibody Molecules and Control Molecules

[0487] The sequence numbers corresponding to the sequences of the PD-L1×CTLA4 bispecific antibody molecules constructed in this example, the corresponding parent monoclonal antibody molecules such as the PD-L1 monoclonal antibody and the CTLA4 monoclonal antibody, and the control molecules are listed in Table 3-9, Table 3-10 and Table 3-11. The structure numbers in Table 3-11 correspond to those in Table 1-1 and FIG. 1. The sequence numbers of the corresponding CDR sequences of the first and second antigen-binding domains of the bispecific antibody molecules are listed in Table 3-12.

TABLE 3-9
Control molecules and parent monoclonal antibodies

| Antibody | |
|---|---|
| No. | Antibody |
| PR000070 | Anti-PD-L1 91G3H5H3, hIgG1(N297A) |
| PR000265 | Anti-PD-L1 91G3H5H3(D54E), hIgG1(N297A) |
| PR000416 | Anti-PD-L1 91G3H5H3(D54E), hIgG1 |
| PR000184 | Anti-CTLA4 heavy-chain antibody CL5v3 |
| PR000149 | Anti-CTLA4 monoclonal antibody iplimumab analog, hIgG1 |
| PR000151 | Anti-PD-L1 monoclonal antibody atezolizumab analog, |
| | hIgG1(N297A) |

TABLE 3-10
Sequence numbers of sequences and CDR sequences of
control molecules and parent monoclonal antibodies

| Antibody | Light | Heavy | | | | | | | | |
|---|---|---|---|---|---|---|---|---|---|---|
| No. | chain | chain | VL | VH | LCDR1 | LCDR2 | LCDR3 | HCDR1 | HCDR2 | HCDR3 |
| PR000070 | 347 | 300 | 282 | 233 | 167 | 188 | 211 | 15 | 62 | 122 |
| PR000265 | 353 | 308 | 282 | 240 | 167 | 188 | 211 | 15 | 69 | 122 |
| PR000416 | 353 | 310 | 282 | 240 | 167 | 188 | 211 | 15 | 69 | 122 |
| PR000184 | None | 303 | None | 236 | None | None | None | 17 | 65 | 125 |
| PR000149 | 348 | 301 | 283 | 234 | 168 | 189 | 212 | 15 | 63 | 123 |
| PR000151 | 349 | 302 | 284 | 235 | 169 | 190 | 213 | 16 | 64 | 124 |

TABLE 3-11
Sequence numbers of PD-L1 × CTLA4
bispecific antibody molecules of this example

| Structure | Antibody | Polypeptide | Polypeptide | Polypeptide |
|---|---|---|---|---|
| No. | No. | chain 1 | chain 2 | chain 3 |
| 3 | PR000300 | 353 | 362 | None |
| 4 | PR000301 | 363 | 364 | None |
| 6 | PR000302 | 365 | 364 | None |
| 5 | PR000303 | 353 | 366 | None |
| 5 | PR000401 | 353 | 369 | None |
| 5 | PR000402 | 353 | 370 | None |
| 1 | PR000403 | 371 | 372 | None |
| 1 | PR000404 | 371 | 373 | None |
| 9 | PR001572 | 363 | 362 | None |
| 3 | PR001573 | 353 | 394 | None |
| 4 | PR001574 | 363 | 310 | None |
| 9 | PR001575 | 363 | 394 | None |
| 3 | PR001576 | 353 | 395 | None |
| 4 | PR001577 | 363 | 396 | None |
| 9 | PR001578 | 363 | 395 | None |
| 11 | PR001609 | 353 | 407 | 390 |
| 11 | PR001610 | 353 | 408 | 392 |

TABLE 3-12
Sequence numbers of CDRs of antigen-binding domains
of PD-L1 × CTLA4 bispecific antibody molecules

| Structure | Antibody | Antigen-binding | | | | | | |
|---|---|---|---|---|---|---|---|---|
| No. | No. | domain No. | LCDR1 | LCDR2 | LCDR3 | HCDR1 | HCDR2 | HCDR3 |
| 1 | PR000403, | #1 | 167 | 188 | 211 | 15 | 69 | 122 |
| | PR000404 | #2 | None | None | None | 17 | 65 | 125 |
| 3 | PR000300 | #1 | 167 | 188 | 211 | 15 | 62 | 122 |
| | | #2 | None | None | None | 17 | 65 | 125 |
| 3 | PR001573, | #1 | 167 | 188 | 211 | 15 | 69 | 122 |
| | PR001576 | #2 | None | None | None | 17 | 65 | 125 |
| 4 | PR000301 | #1 | 167 | 188 | 211 | 15 | 62 | 122 |
| | | #2 | None | None | None | 17 | 65 | 125 |
| 4 | PR001574, | #1 | 167 | 188 | 211 | 15 | 69 | 122 |
| | PR001577 | #2 | None | None | None | 17 | 65 | 125 |
| 5 | PR000303 | #1 | 167 | 188 | 211 | 15 | 62 | 122 |
| | | #2 | None | None | None | 17 | 65 | 125 |
| 5 | PR000401, | #1 | 167 | 188 | 211 | 15 | 69 | 122 |
| | PR000402 | #2 | None | None | None | 17 | 65 | 125 |
| 6 | PR000302 | #1 | 167 | 188 | 211 | 15 | 62 | 122 |
| | | #2 | None | None | None | 17 | 65 | 125 |
| 9 | PR001572 | #1 | 167 | 188 | 211 | 15 | 62 | 122 |
| | | #2 | None | None | None | 17 | 65 | 125 |
| 9 | PR001575, | #1 | 167 | 188 | 211 | 15 | 69 | 122 |
| | PR001578 | #2 | None | None | None | 17 | 65 | 125 |
| 11 | PR001609, | #1 | 167 | 188 | 211 | 15 | 69 | 122 |
| | PR001610 | #2 | None | None | None | 17 | 65 | 125 |

### Example 3.4. Binding to CTLA4

[0488] This example is intended to investigate the binding activity of the PD-L1×CTLA4 bispecific antibody molecules to CTLA4.

### Example 3.4.1. Binding to Human CTLA4 Extracellular Domain Recombinant Protein

[0489] The binding ability of the antibody molecules to human CTLA4 recombinant protein was determined by enzyme-linked immunosorbent assay (ELISA). Specifically, a 96-well plate was firstly coated with 2 μg/mL human CTLA4-His protein (ACRO Biosystems, #CT4-H5229) at 100 μL/well and incubated at 4° C. overnight. The plate was then rinsed 3 times with a PBST buffer (a PBS buffer containing 0.05% Tween-20), added with a blocking buffer (a PBS buffer containing 5% skim milk powder), and incubated at 37° C. for 1 h. The plate was then rinsed 3 times with a PBST buffer. Then, the antibody molecules at a total of 8 concentrations obtained by a 5-fold gradient dilution with the highest final concentration of 30 nM were added at 100 μL/well. The mixture was mixed well and incubated at 37° C. for 1 h. hIgG1 iso (CrownBio, #C0001) was used as an isotype control. The plate was then rinsed 3 times with a PBST buffer. Then, the HRP-labeled goat anti-human IgG Fc secondary antibody (Sigma, #A0170, diluted in a 1:5000 ratio) was added at 100 μL/well, and the mixture was incubated at 37° C. for 0.5 h. The plate was then rinsed 3 times with a PBST buffer. Then, TMB chromogenic solution was added at 100 μL/well for reaction for 15 min. Finally, a stop buffer was added to stop the reaction. The absorbance value (OD value) was read at 450 nM using an Enspire™ multifunctional microplate reader (Perkin Elmer, Inc.). The data were processed and analyzed by plotting using GraphPad Prism 8 software, and binding curves, EC₅₀ values and other parameters were obtained through four-parameter nonlinear fitting.

[0490] In this example, the anti-CTLA4 HCAb monoclonal antibody PR000184 was used as a positive control molecule, and was also the parent monoclonal antibody of the CTLA4 end of the PD-L1×CTLA4 bispecific antibody molecule.

[0491] As shown in FIG. 2 and Table 3-13, the binding ability of the bispecific antibody molecules of IgG-VH tetravalent symmetric structures to CTLA4 was related to the position of the VH end of anti-CTLA4 relative to anti-PD-L1 IgG in the bispecific antibody structure. When VH was at the N-terminus of the heavy chain (PR000300) or the N-terminus of the light chain (PR000301) of IgG, the bispecific antibody molecule had a similar or even slightly superior EC₅₀ value for binding to CTLA4 to the parent monoclonal antibody PR000184; when VH was at the C-terminus of the heavy chain (PR000303) of IgG, the bispecific antibody molecule had an EC₅₀ value for binding to CTLA4 that was 2.6 times poorer than the parent monoclonal antibody PR000184; when VH was at the C-terminus of the light chain (PR000302) of IgG, the bispecific antibody molecule had significantly weakened binding ability to CTLA4. This indicates that the binding ability of the VH to the target can be modulated by adjusting the relative position of the VH on IgG.

TABLE 3-13
Binding to human CTLA4 protein

| | | Maximum |
|---|---|---|
| Antibody | EC₅₀ (nM) | OD450 |
| PR000184 | 0.599 | 3.01 |
| PR000300 | 0.567 | 2.95 |
| PR000301 | 0.35 | 2.92 |
| PR000302 | 10.6 | 3.55 |
| PR000303 | 1.566 | 2.72 |

### Example 3.4.2. Binding to CHO-K1 Cells CHO-K1/hCTLA4 Highly Expressing Human CTLA4 or HEK293 Cells HEK293/hCTLA4 Highly Expressing Human CTLA4

[0492] The binding ability of antibody molecules to cells such as a CHO-K1 cell line CHO-K1/hCTLA4 (KYinno, KC-1406) highly expressing human CTLA4 or an HEK293T cell line HEK293/hCTLA4 (KYinno, KC-0209) highly expressing human CTLA4 was determined by flow cytometry FACS. Specifically, CHO-K1/hCTLA4 and HEK293/hCTLA4 cells were digested and resuspended in an F12K medium and a DMEM medium, respectively, with the cell density adjusted to 1×10⁶ cells/mL. Thereafter, the cells were seeded in a 96-well V-bottom plate (Corning, #3894) at 100 μL/well and centrifuged at 4° C. for 5 min, and the supernatant was discarded. Then, the antibody molecules at a total of 8 concentrations obtained by a 5-fold gradient dilution from the highest final concentration of 300 nM, or a total of 8 concentrations obtained by a 4-fold gradient dilution from the highest final concentration of 100 nM were added to the 96-well plate at 100 μL/well, and the mixture was mixed well. hIgG1 iso (CrownBio, #C0001) was used as an isotype control. The cells were incubated at 4° C. for 1 h away from light. Then, the cells in each well were rinsed twice with 100 μL of pre-cooled FACS buffer (PBS buffer containing 0.5% BSA) and centrifuged at 500 g at 4° C. for 5 min, and then the supernatant was discarded. Thereafter, a fluorescent secondary antibody (Alexa Fluor 488 anti-human IgG Fc, Biolegend, #409322, diluted in a 1:1000 ratio) was added at 100 μL/well, and the plate was incubated at 4° C. for 1 h away from light. Then, the cells in each well were then rinsed twice with 200 μL of pre-cooled FACS buffer and centrifuged at 500 g at 4° C. for 5 min, and then the supernatant was discarded. Finally, a pre-cooled FACS buffer was added at 200 μL/well to resuspend the cells. Fluorescence signal values were read using a BD FACS CANTOII flow cytometer or an ACEA NovoCyte flow cytometer, and the data were processed and analyzed using FlowJo v10 (FlowJo, LLC) software. The data were processed and analyzed by plotting using GraphPad Prism 8 software, and binding curves of the antibodies to target cells, EC₅₀ values and other parameters were obtained through four-parameter nonlinear fitting.

[0493] In this example, the anti-CTLA4 HCAb monoclonal antibody PR000184 was used as a positive control molecule, and was also the parent monoclonal antibody of the CTLA4 end of the PD-L1×CTLA4 bispecific antibody molecule. The Ipilimumab analog was also used as a positive control molecule. The results are shown in FIG. 3, FIG. 4, Table 3-14 and Table 3-15.

[0494] As shown in FIG. 3 (A-B) and FIG. 4 (A), the binding ability of the bispecific antibody molecules of IgG-VH tetravalent symmetric structures to CTLA4 was related to the position of the VH end of anti-CTLA4 relative to anti-PD-L1 IgG in the bispecific antibody structure. When VH was at the N-terminus of the heavy chain (PR000300 and PR001573) or the N-terminus of the light chain (PR000301, PR001574, and PR001577) of IgG, the bispecific antibody molecules had similar or slightly poorer EC₅₀ values for binding to CTLA4 than the parent monoclonal antibody PR000184, but had higher maximum MFIs on FACS than the parent monoclonal antibody PR000184 or the positive control Ipilimumab. When VH was at the C-terminus of the heavy chain (PR000303, PR000401, and PR000402) of IgG, the bispecific antibody molecule had a slightly poorer EC₅₀ value for binding to CTLA4 than the parent monoclonal antibody PR000184. When VH was at the C-terminus of the light chain (PR000302) of IgG, the bispecific antibody molecule had significantly weakened binding ability to CTLA4. This indicates that the binding ability of the VH to the target can be modulated by adjusting the relative position of the VH on IgG.

[0495] As shown in FIG. 3 (C), the bispecific antibody molecules of 2×VH-IgG hexavalent symmetric structures had similar EC₅₀ values for binding to CTLA4 to the parent monoclonal antibody PR000184, but had lower maximum MFIs than the parent monoclonal antibody PR000184. This is probably because the 2×VH-IgG hexavalent symmetric structure contains 4 binding sites for CTLA4, which is twice as many as the CTLA4-binding sites of the parent monoclonal antibody PR000184, so that the amount of bispecific antibody molecules required to bind to the same number of CTLA4 molecules is less than that of the parent monoclonal antibody, and the MFI value is related to the number of fluorescent bispecific antibodies that bind to the Fc region of the bispecific antibody molecules, so that it is reflected in that the maximum MFI of the bispecific antibody molecule is lower than that of the parent monoclonal antibody.

[0496] As shown in FIG. 3 (D), the bispecific antibody molecules of Fab-Fc-VH asymmetric structures PR001609 and PR001610 contained only one CTLA4-binding domain, and thus their binding ability to CTLA4 was weaker than that of the bivalent parent monoclonal antibody PR000184.

[0497] As shown in FIG. 3 (E) and FIG. 4 (B), the bispecific antibody molecules of Fab-HCAb symmetric structures had weaker binding ability to CTLA4 than the bivalent parent monoclonal antibody PR000184, but had similar maximum MFIs to the positive control Ipilimumab.

TABLE 3-14
Binding to CHO-K1/hCTLA4

| | EC₅₀ | Maximum | | EC₅₀ | Maximum | | EC₅₀ | Maximum |
|---|---|---|---|---|---|---|---|---|
| Antibody | (nM) | MFI | Antibody | (nM) | MFI | Antibody | (nM) | MFI |
| PR000184 | 1.688 | 1668 | PR001573 | 9.905 | 780.8 | PR001609 | n.d. | 355.4 |
| PR000300 | 2.914 | 2621 | PR001574 | 11.98 | 677.2 | PR001610 | n.d. | 467.9 |
| PR000301 | 1.935 | 2360 | PR001577 | 8.516 | 584.9 | PR000403 | 20.54 | 343.2 |
| PR000302 | 26.15 | 1566 | PR001572 | 2.911 | 433.7 | PR000404 | 26.92 | 338.6 |
| PR000303 | 4.362 | 2040 | PR001575 | 5.075 | 415.3 | PR000184 | 4.642 | 722 |
| | | | PR001578 | 4.646 | 401.3 | Ipilimumab | 3.412 | 420.3 |

| | |
|---|---|
| Test 1 | Test 2 |

TABLE 3-15
Binding to HEK293/hCTLA4

| | | Maximum |
|---|---|---|
| Antibody | EC₅₀ (nM) | MFI |
| PR000401 | 5.173 | 1911 |
| PR000402 | 2.4 | 1764 |
| PR000403 | 16.3 | 1408 |
| PR000404 | 37.22 | 1615 |
| PR000184 | 1.147 | 2261 |

### Example 3.5. Blocking the Binding of CTLA4 to its Ligand

[0498] This example is intended to investigate the inhibitory activity of the PD-L1×CTLA4 bispecific antibody molecules for the binding of CTLA4 to its ligand B7-1/CD80.

### Example 3.5.1. Blocking the Binding of Human CTLA4 Protein to its Ligand Protein

[0499] The inhibitory activity of the antibody molecules for the binding of human CTLA4 protein to its ligand B7-1/CD80 was determined by enzyme-linked immunosorbent assay (ELISA). Specifically, a 96-well plate was firstly coated with 2 μg/mL protein human B7-1-Fc (ACRO Biosystems, #B71-H5259) at 100 μL/well and placed at 4° C. overnight. The plate was then rinsed 3 times with a PBST buffer (a PBS buffer containing 0.05% Tween-20), added with a blocking buffer (a PBS buffer containing 5% skim milk powder), and incubated at 37° C. for 1 h. Then, the antibody molecules at a total of 7 concentrations obtained by a 4-fold gradient dilution with the highest final concentration of 180 nM were added at 90 μL/well. The mixture was mixed well and incubated at 37° C. for 20 min. hIgG1 iso (CrownBio, #C0001) was used as an isotype control. Then, biotinylated human CTLA4-Fc protein (ACRO Biosystems, #CT4-H82F3) was added at 10 μL/well to make a final concentration of 0.25 μg/mL, and the mixture was incubated at 37° C. for 1 h. The plate was then rinsed 3 times with a PBST buffer. Then, a label Precision Protein™ StrepTactin-HRP conjugate (Bio-RAD, #1610380, diluted in a 1:4000 ratio) was added at 100 μL/well, and the mixture was incubated at 37° C. for 0.5 h. The plate was then rinsed 3 times with a PBST buffer. Then, TMB chromogenic solution was added at 100 μL/well for reaction for 15 min. Finally, a stop buffer was added to stop the reaction. The absorbance value (OD value) was read at 490 nM using an Enspire™ multifunctional microplate reader (Perkin Elmer, Inc.). The data were processed and analyzed by plotting using GraphPad Prism 8 software to convert the OD value into the inhibition rate, and inhibition curves, IC₅₀ values, the maximum inhibition rates and other parameters were obtained through a four-parameter nonlinear fitting.

[0500] In this example, the anti-CTLA4 HCAb monoclonal antibody PR000184 was used as a positive control molecule, and was also the parent monoclonal antibody of the CTLA4 end of the PD-L1×CTLA4 bispecific antibody molecule. The results are shown in FIG. 5 and Table 3-16.

[0501] As shown in FIG. 5, the bispecific antibody molecules of IgG-VH tetravalent symmetric structures all had the ability (inhibitory activity) to block the binding of CTLA4 protein to its ligand protein with an inhibition rate of nearly 100%, but their IC₅₀ values for the inhibitory activity were related to the position of the VH end of anti-CTLA4 relative to anti-PD-L1 IgG in the bispecific antibody structure. When VH was at the N-terminus of the heavy chain (PR000300) or the N-terminus of the light chain (PR000301) of IgG, the bispecific antibody molecule had similar inhibitory activity for CTLA4 to the parent monoclonal antibody PR000184. When VH was at the C-terminus of the heavy chain (PR000303) of IgG, the bispecific antibody molecule had slightly weaker inhibitory activity for CTLA4 than the parent monoclonal antibody PR000184. When VH was at the C-terminus of the light chain (PR000302) of IgG, the bispecific antibody molecule had an IC₅₀ value for the inhibitory activity that was 4 times weaker than the parent monoclonal antibody PR000184. This indicates that the ability of the VH to block the target can be modulated by adjusting the relative position of the VH on IgG.

TABLE 3-16
Blocking the binding of human CTLA4 protein to B7-1 protein

| | | Maximum inhibition |
|---|---|---|
| Antibody | IC₅₀ (nM) | rate (%) |
| PR000184 | 2.673 | 97.20 |
| PR000300 | 2.091 | 98.17 |
| PR000301 | 2.511 | 98.31 |
| PR000302 | 11.57 | 98.91 |
| PR000303 | 4.121 | 97.26 |

### Example 3.5.2. Blocking the Binding of Human CTLA4 Cell to its Ligand Protein

[0502] The inhibitory activity of the antibody molecules for the binding of cells expressing CTLA4 to the ligand B7-1/CD80 of CTLA4 was determined by flow cytometry FACS. Specifically, a CHO-K1 cell line CHO-K1/hCTLA4 (KYinno, KC-1406) highly expressing human CTLA4 was digested and resuspended in an F12K medium, with the cell density adjusted to 1×10⁶ cells/mL. The cells were incubated in an FACS buffer (a PBS buffer containing 2% FBS) at 37° C. for 15 min. The FACS buffer was added to a 96-well plate at 200 μL/well for blocking. After incubation at 37° C. for 1 h, the blocking buffer in the wells was discarded. Thereafter, the CHO-K1/hCTLA4 cells were seeded in the 96-well plate at 200 μL/well (2×10⁵ cells/well) and centrifuged at 500 g at 4° C. for 5 min, and the supernatant was discarded. Then, the antibody molecules at a total of 8 concentrations obtained by a 3-fold gradient dilution from the highest final concentration of 200 nM, or a total of 8 concentrations obtained by a 5-fold gradient dilution from the highest final concentration of 400 nM were added to the 96-well plate at 100 μL/well, and the mixture was mixed well. hIgG1 iso (CrownBio, #C0001) was used as an isotype control. Then, 1 μg/mL biotinylated ligand protein human B7-1-Fc (ACRO Biosystems, #B71-H82F2) was added to the 96-well plate at 100 μL/well, and the mixture was mixed well. The 96-well plate was incubated at 4° C. for 1.5 h away from light. Then, the cells in each well were rinsed twice with 200 μL of pre-cooled FACS buffer and centrifuged at 500 g at 4° C. for 5 min, and then the supernatant was discarded. Thereafter, a fluorescent label (Streptavidin, Alexa Fluor™ 488 conjugate, Thermo, #S11223, diluted in a 1:500 ratio) was added at 100 μL/well, and the plate was incubated at 4° C. for 1 h away from light. Then, the cells in each well were rinsed three times with 200 μL of pre-cooled FACS buffer and centrifuged at 500 g at 4° C. for 5 min, and then the supernatant was discarded. Finally, a pre-cooled FACS buffer was added at 200 μL/well to resuspend the cells. Fluorescence signal values were read using a BD FACS CANTOII flow cytometer or an ACEA NovoCyte flow cytometer, and the data were processed and analyzed using FlowJo v10 (FlowJo, LLC) software. The data were processed and analyzed by plotting using GraphPad Prism 8 software to convert the fluorescence signal (MFI) into the inhibition rate, and inhibition curves, IC₅₀ values, the maximum inhibition rates and other parameters were obtained through four-parameter nonlinear fitting.

[0503] In this example, the anti-CTLA4 HCAb monoclonal antibody PR000184 was used as a positive control molecule, and was also the parent monoclonal antibody of the CTLA4 end of the PD-L1×CTLA4 bispecific antibody molecule. The results are shown in FIG. 6 and Table 3-17.

[0504] As shown in FIG. 6 (A-B), the inhibitory activity of the bispecific antibody molecules of IgG-VH tetravalent symmetric structures for CTLA4 was related to the position of the VH end of anti-CTLA4 relative to anti-PD-L1 IgG in the bispecific antibody structure. When VH was at the N-terminus of the heavy chain (PR000300 and PR001573) or the N-terminus of the light chain (PR000301, PR001574, and PR001577) of IgG, the bispecific antibody molecules all had a similar IC₅₀ value for the inhibitory activity to the parent monoclonal antibody PR000184, with an inhibition rate of nearly 100%, and PR000301 even had a higher inhibition rate than the parent monoclonal antibody PR000184. When VH was at the C-terminus of the heavy chain (PR000303) of IgG, the bispecific antibody molecule had a slightly weaker IC₅₀ value for the inhibitory activity than the parent monoclonal antibody PR000184, with the maximum inhibition rate of about 83%. When VH was at the C-terminus of the light chain (PR000302) of IgG, the bispecific antibody molecule had significantly weakened inhibitory activity, with a maximum inhibition rate of only 49%. This indicates that the ability of the VH to block the target can be modulated by adjusting the relative position of the VH on IgG. In another aspect, the results of different inhibitory activity of the same bispecific antibody molecule in the blocking experiment of CTLA4 cells and in the blocking experiment of CTLA4 protein may reflect the effect of steric hindrance of the protein on the cell membrane.

[0505] As shown in FIG. 6 (C), the bispecific antibody molecules of 2×VH-IgG hexavalent symmetric structures had similar inhibitory activity for CTLA4 to the parent monoclonal antibody PR000184.

[0506] As shown in FIG. 6 (D), the bispecific antibody molecules PR001609 and PR001610 of Fab-Fc-VH asymmetric structures both contained only one CTLA4-binding domain, so that their inhibitory activity for CTLA4 was significantly weaker than that of the bivalent parent monoclonal antibody PR000184.

TABLE 3-17
Blocking the binding of CHO-K1/hCTLA4 cell to B7-1 protein

| | | Maximum | | | Maximum | | | Maximum |
|---|---|---|---|---|---|---|---|---|
| | IC₅₀ | inhibition | | IC₅₀ | inhibition | | IC₅₀ | inhibition |
| Antibody | (nM) | rate (%) | Antibody | (nM) | rate (%) | Antibody | (nM) | rate (%) |
| PR000184 | 4.132 | 99.71 | PR001573 | 6.222 | 99.2 | PR001578 | 2.966 | 100 |
| PR000300 | 6.417 | 100.8 | PR001574 | 4.488 | 99.8 | PR001609 | 98.33 | 95 |
| PR000301 | 3.21 | 99.88 | PR001577 | 4.883 | 99.7 | PR001610 | 96.56 | 61.3 |
| PR000302 | 71.23 | 48.98 | PR001572 | 2.982 | 100 | PR000184 | 3.009 | 100 |
| PR000303 | 9.712 | 83.3 | PR001575 | 3.795 | 100 | | | |

| | |
|---|---|
| Test 1 | Test 2 |

### Example 3.6. ADCC Effect Mediated by CTLA4

[0507] This example is intended to investigate the antibody-dependent cell-mediated cytotoxicity (ADCC) of PD-L1×CTLA4 bispecific antibody molecules to 293F-hCTLA4 cells (ChemPartner) highly expressing human CTLA4. In the first step, target cells were labeled with DELFIA BATDA (Perkin Elmer, #C136-100). The specific labeling method was as follows. 1×10⁶ target cells were labeled with 2 μL of DELFIA BATDA reagent; the cells were incubated in an incubator at 37° C. with CO₂ for 20 min, washed 4 times with PBS, and centrifuged at 1000 rpm for 5 min; after the last wash, the precipitate was resuspended in a complete medium, with the cell density adjusted to 1×10⁵/mL. In the second step, the labeled target cells were seeded in a 96-well plate (Corning, #3599) at 100 μL/well. Then, the antibody molecules at a total of 7 concentrations obtained by a 5-fold gradient dilution with the highest final concentration of 0.8 nM were added at 50 μL/well. The mixture was mixed well. hIgG1 iso (CrownBio, #C0001) was used as an isotype control. The cells were incubated in an incubator at 37° C. with 5% CO₂ for 10 min. In the third step, the NK-92 MI/CD16a cells (ChemPartner) were collected as effector cells, and the cell density of NK-92 MI/CD16a was adjusted to 6×10⁵/mL. Then, the cells were added to the 96-well plate at 50 μL/well in an effect-to-target ratio of 3:1. Thereafter, the cells were incubated in an incubator at 37° C. with 5% CO₂ for 2 h. In the fourth step, the cells were centrifuged at 500 g for 5 min, and then 25 μL of supernatant from each well was added to a new 96-well assay plate. Then, a DELFIA® Europium solution (Perkin Elmer, #C135-100) was added at 200 μL/well, and the plate was shaken at 250 rpm at room temperature for 15 min. Finally, fluorescence values were measured using an EnVision® 2015 multifunctional microplate reader (Perkin Elmer, Inc.).

[0508] The killing rate was calculated according to the following formula:

Kill rate (%)=(ER−ETSR)/(TMR−ETSR)×100%

[0509] wherein:
[0510] ER=experimental well (antibody+ effector cell+target cell); ETSR=spontaneous release well for mixed effector cell and target cell (effector cell+target cell); TMR=maximum release well for target cell (target cell+lysis buffer)

[0511] The data were processed and analyzed by plotting using GraphPad Prism 8 software, and killing rate curves of the antibodies to target cells, EC₅₀ values, maximum killing rates and other parameters were obtained through four-parameter nonlinear fitting.

[0512] In this example, the anti-CTLA4 HCAb monoclonal antibody PR000184 (hIgG1 subtype) was used as a positive control molecule, and was also the parent monoclonal antibody of the CTLA4 end of the PD-L1×CTLA4 bispecific antibody molecule. The anti-PD-L1 monoclonal antibody PR000416 (hIgG1 subtype) was used as a negative control molecule.

[0513] As shown in FIG. 11 and Table 3-18, the bispecific antibody molecules PR000300 and PR000301 had similar ADCC effect on CTLA4 to the parent monoclonal antibody PR000184.

TABLE 3-18
Killing target cells by ADCC effect

| | | Maximum killing |
|---|---|---|
| Antibody | EC₅₀ (nM) | rate (%) |
| PR000300 | 0.008 | 23.81 |
| PR000301 | 0.031 | 36.62 |
| PR000184 | 0.015 | 30.20 |

### Example 3.7. Binding to PD-L1

[0514] This example is intended to investigate the binding activity of the PD-L1×CTLA4 bispecific antibody molecules to PD-L1.

### Example 3.7.1. Binding to Human PD-L1 Extracellular Domain Recombinant Protein

[0515] The binding ability of the antibody molecules to PD-L1 recombinant protein was determined by enzyme-linked immunosorbent assay (ELISA). Specifically, a 96-well plate (Corning, #9018) was firstly coated with 2 μg/mL human PD-L1-His protein (ACRO Biosystems, #PD1-H5229) at 100 μL/well and placed at 4° C. overnight. Then, the protein-coated plate was rinsed 3 times with a PBST buffer (a PBS buffer containing 0.05% Tween-20), added with a blocking buffer containing 2% BSA, and incubated at 37° C. for 1 h. The blocking buffer was discarded, and the plate was rinsed 3 times with a PBST buffer. Then, the antibody molecules at a total of 8 concentrations obtained by a 5-fold gradient dilution with the highest final concentration of 30 nM were added at 100 μL/well. The mixture was mixed well and incubated at 37° C. for 1 h. hIgG1 iso (CrownBio, #C0001) was used as an isotype control. The plate was then rinsed 3 times with a PBST buffer. Then, the HRP-labeled goat anti-human IgG Fc secondary antibody (Sigma, #A0170, diluted in a 1:5000 ratio) was added at 100 μL/well, and the mixture was incubated at 37° C. for 0.5 h. The plate was then rinsed 3 times with a PBST buffer. Then, TMB chromogenic solution was added at 100 μL/well for reaction for 15 min. Finally, a stop buffer was added to stop the reaction. The absorbance value (OD value) was read at 450 nM using an Enspire™ multifunctional microplate reader (Perkin Elmer, Inc.).

[0516] The data were processed and analyzed by plotting using GraphPad Prism 8 software, and binding curves, EC₅₀ values and other parameters were obtained through four-parameter nonlinear fitting.

[0517] In this example, the anti-PD-L1 monoclonal antibody PR000070 was used as a positive control molecule, and was also the parent monoclonal antibody of the PD-L1 end of the PD-L1×CTLA4 bispecific antibody molecule.

[0518] As shown in FIG. 7 and Table 3-19, the bispecific antibody molecules of IgG-VH tetravalent symmetric structures had similar binding ability to PD-L1 to the parent monoclonal antibody PR000070. This indicates that the VH domain of anti-CTLA4 has no significant effect on the Fab domain of anti-PD-L1.

TABLE 3-19
Binding to human PDL1 protein

| | | Maximum |
|---|---|---|
| Antibody | EC₅₀ (nM) | OD450 |
| PR000070 | 0.146 | 3.454 |
| PR000300 | 0.108 | 3.519 |
| PR000301 | 0.131 | 3.528 |
| PR000302 | 0.152 | 3.542 |
| PR000303 | 0.241 | 3.523 |

### Example 3.7.2. Binding to CHO-K1 Cells CHO-K1/hPDL1 Highly Expressing Human PD-L1 or Tumor Cells MDA-MB-231 Highly Expressing Human PD-L1

[0519] The binding ability of the antibody molecules to a CHO-K1 cell line CHO-K1/hPDL1 (GenScript, M00543) highly expressing human PD-L1 or a tumor cell line MDA-MB-231 (ATCC, HTB-26) highly expressing human PD-L1 and other cells was determined by flow cytometry FACS. Specifically, the cells were digested and resuspended in a complete medium, with the cell density adjusted to 1×10⁶ cells/mL. Thereafter, the cells were seeded in a 96-well V-bottom plate (Corning, #3894) at 100 μL/well and centrifuged at 4° C. for 5 min, and the supernatant was discarded. Then, the antibody molecules at a total of 8 concentrations obtained by a 5-fold gradient dilution from the highest final concentration of 60 nM, or a total of 8 concentrations obtained by a 5-fold gradient dilution from the highest final concentration of 300 nM, or a total of 8 concentrations obtained by a 4-fold gradient dilution from the highest final concentration of 100 nM were added to the 96-well plate at 100 μL/well, and the mixture was mixed well. hIgG1 iso (CrownBio, #C0001) was used as an isotype control. The cells were incubated at 4° C. for 1 h away from light. Then, the cells in each well were rinsed twice with 100 μL of pre-cooled FACS buffer (PBS buffer containing 0.5% BSA) and centrifuged at 500 g at 4° C. for 5 min, and then the supernatant was discarded. Thereafter, a fluorescent secondary antibody (Goat human IgG (H+L) Alexa Fluor 488 conjugation, Thermo, #A11013, 1:1000 dilution) was added at 100 μL/well, and the plate was incubated at 4° C. for 1 h away from light. Then, the cells in each well were then rinsed twice with 200 μL of pre-cooled FACS buffer and centrifuged at 500 g at 4° C. for 5 min, and then the supernatant was discarded. Finally, a pre-cooled FACS buffer was added at 200 μL/well to resuspend the cells. Fluorescence signal values were read using a BD FACS CANTOII flow cytometer or an ACEA NovoCyte flow cytometer, and the data were processed and analyzed using FlowJo v10 (FlowJo, LLC) software. The data were processed and analyzed by plotting using GraphPad Prism 8 software, and binding curves of the antibodies to target cells, EC₅₀ values and other parameters were obtained through four-parameter nonlinear fitting.

[0520] In this example, the anti-PD-L1 monoclonal antibody PR000070 or PR000416 (or PR000265) was used as a positive control molecule, and was also the parent monoclonal antibody of the PD-L1 end of the PD-L1×CTLA4 bispecific antibody molecule. The results are shown in FIG. 8, FIG. 9, Table 3-20 and Table 3-21.

[0521] As shown in FIG. 8 (A-B) and FIG. 9, the bispecific antibody molecules of IgG-VH tetravalent symmetric structures had similar binding ability to PD-L1 to the corresponding parent monoclonal antibody PR000070 or PR000416, and their EC₅₀ values for binding to PD-L1 are very close. Only when VH was at the N-terminus of the light chain (PR000301, PR001574, and PR001577) of IgG, the bispecific antibody molecules had slightly lower maximum MFIs than the parent monoclonal antibody.

[0522] As shown in FIG. 8 (C), the bispecific antibody molecules of 2×VH-IgG hexavalent symmetric structures had significantly reduced binding ability to PD-L1 as compared to the parent monoclonal antibody PR000416, indicating that when VH is linked to the N-terminus of both the heavy and light chains of IgG, the function of Fab end of IgG is significantly affected.

[0523] As shown in FIG. 8 (D), the bispecific antibody molecules of Fab-HCAb symmetric structures had similar binding ability to PD-L1 to the parent monoclonal antibody PR000416, and they have similar EC₅₀ values and maximum MFIs. This indicates that the Fab end structure of anti-PD-L1 of the bispecific antibody molecule of a Fab-HCAb symmetric structure can well retain the binding ability to PD-L1.

[0524] As shown in FIG. 8 (E), the PD-L1-binding domains of the bispecific antibody molecules PR001609 and PR001610 of Fab-Fc-VH asymmetric structures were monovalent Fab structures, but those bispecific antibody molecules had similar binding ability to PD-L1 to the parent monoclonal antibody of a bivalent structure, and had higher maximum MFIs than the parent monoclonal antibody.

TABLE 3-20
Binding to CHO-K1/hPDL1 cells

| | EC₅₀ | Maximum | | EC₅₀ | Maximum | | EC₅₀ | Maximum |
|---|---|---|---|---|---|---|---|---|
| Antibody | (nM) | MFI | Antibody | (nM) | MFI | Antibody | (nM) | MFI |
| PR000070 | 0.747 | 22681 | PR001573 | 0.83 | 8308 | PR001609 | 1.51 | 11168 |
| PR000300 | 0.884 | 21029 | PR001574 | 0.93 | 6712 | PR001610 | 1.37 | 11146 |
| PR000301 | 0.918 | 16556 | PR001577 | 0.96 | 6609 | PR000403 | 0.73 | 8094 |
| PR000302 | 0.737 | 18580 | PR001572 | 1.07 | 5828 | PR000404 | 0.78 | 8102 |
| PR000303 | 0.848 | 17992 | PR001575 | 2.41 | 5879 | PR000416 | 0.5 | 8379 |
| | | | PR001578 | 1.94 | 5658 | | | |

| | |
|---|---|
| Experiment 1 | Experiment 2 |

TABLE 3-21
Binding to MDA-MB-231 cells

| | | Maximum |
|---|---|---|
| Antibody | EC₅₀ (nM) | MFI |
| PR000401 | 0.288 | 994 |
| PR000402 | 0.259 | 841 |
| PR000265 | 0.163 | 958 |

### Example 3.8. Blocking the Binding of PD-L1 to its Ligand

[0525] This example is intended to investigate the inhibitory activity of the PD-L1×CTLA4 bispecific antibody molecules for the binding of PD-L1 to its ligand PD-1.

### Example 3.8.1. Blocking the Binding of Human PD-L1 Cell to its Ligand Protein

[0526] The inhibitory activity of the antibody molecules for the binding of cells expressing PD-L1 to the ligand PD-1 of PD-L1 was determined by flow cytometry FACS. Specifically, a CHO-K1 cell line CHO-K1/hPDL1 (GenScript, M00543) highly expressing human PD-L1 was digested and resuspended in an F12K medium, with the cell density adjusted to 2×10⁶ cells/mL. The cells were incubated in an FACS buffer (a PBS buffer containing 1% BSA) at 37° C. for 15 min. A blocking buffer was added to a 96-well plate at 200 μL/well. After incubation at 37° C. for 1 h, the blocking buffer in the wells was discarded. Thereafter, the CHO-K1/hPDL1 cells were seeded in the 96-well plate (1×10⁵ cells/well) at 50 μL/well. Then, the antibody molecules at a total of 8 concentrations obtained by a 5-fold gradient dilution from the highest final concentration of 100 nM were added to the 96-well plate at 100 μL/well. hIgG1 iso (CrownBio, #C0001) was used as an isotype control. The cells were incubated at 4° C. for 0.5 h away from light. Then, a PBS buffer was added at 100 μL/well, the mixture was centrifuged at 500 g at 4° C. for 5 min, and the supernatant was discarded. Then, 1 μg/mL biotinylated ligand protein human PD-1 protein (ACRO Biosystems, #PD1-H82F2) was added to the 96-well plate at 50 μL/well, and the mixture was mixed well. The 96-well plate was incubated at 4° C. for 0.5 h away from light. Then, the cells in each well were then rinsed twice with 100 μL of pre-cooled PBS buffer and centrifuged at 500 g at 4° C. for 5 min, and then the supernatant was discarded. Thereafter, a fluorescent secondary antibody (PE Streptavidin, BD Biosciences, #554061, 1:200 dilution) was added at 100 μL/well, and the plate was incubated at 4° C. for 0.5 h away from light. Then, the cells in each well were then rinsed twice with 200 μL of pre-cooled PBS buffer and centrifuged at 500 g at 4° C. for 5 min, and then the supernatant was discarded. Finally, a pre-cooled FACS buffer was added at 200 μL/well to resuspend the cells. Fluorescence signal values were read using a BD FACS CANTOII flow cytometer or an ACEA NovoCyte flow cytometer, and the data were processed and analyzed using FlowJo v10 (FlowJo, LLC) software. The data were processed and analyzed by plotting using GraphPad Prism 8 software to convert the fluorescence signal (MFI) into the inhibition rate, and inhibition curves, IC₅₀ values, the maximum inhibition rates and other parameters were obtained through four-parameter nonlinear fitting.

[0527] In this example, the anti-PD-L1 monoclonal antibody PR000070 or PR000416 (or PR000265) was used as a positive control molecule, and was also the parent monoclonal antibody of the PD-L1 end of the PD-L1×CTLA4 bispecific antibody molecule. The results are shown in FIG. 10 and Table 3-22.

[0528] As shown in FIG. 10 (A-B), the bispecific antibody molecules of IgG-VH tetravalent symmetric structures had similar inhibition ability to PD-L1 to the corresponding parent monoclonal antibody PR000070 or PR000416, and had similar IC₅₀ value and maximum inhibition rate to the parent monoclonal antibody. Only when VH was at the N-terminus of the light chain (PR001574 and PR001577) of IgG, the bispecific antibody molecules had an IC₅₀ value that was 2-3 times poorer than the parent monoclonal antibody.

[0529] As shown in FIG. 10 (C), the bispecific antibody molecules of 2×VH-IgG hexavalent symmetric structures had weaker inhibitory activity for PD-L1 than the parent monoclonal antibody; and they achieved a similar maximum inhibition rate to the parent monoclonal antibody although their corresponding IC₅₀ values were 4-6 times poorer than that of the parent monoclonal antibody.

[0530] As shown in FIG. 10 (D), the bispecific antibody molecules of Fab-HCAb symmetric structures had similar inhibitory activity for PD-L1 to the parent monoclonal antibody, and had similar IC₅₀ value and maximum inhibition rate to the parent monoclonal antibody.

[0531] As shown in FIG. 10 (E), the PD-L1-binding domains of the bispecific antibody molecules PR001609 and PR001610 of Fab-Fc-VH asymmetric structures were monovalent Fab structures, and those bispecific antibody molecules had weaker inhibitory activity for PD-L1 than the bivalent parent monoclonal antibody; and they achieved a similar maximum inhibition rate to the parent monoclonal antibody, although their corresponding IC₅₀ values were 4-5 times poorer than that of the parent monoclonal antibody.

TABLE 3-22
Blocking the binding of CHO-K1/hPDL1 to PD1 protein

| | | Maximum | | | Maximum | | | Maximum |
|---|---|---|---|---|---|---|---|---|
| | IC₅₀ | inhibition | | IC₅₀ | inhibition | | IC₅₀ | inhibition |
| Antibody | (nM) | rate (%) | Antibody | (nM) | rate (%) | Antibody | (nM) | rate (%) |
| PR000070 | 0.725 | 96.8 | PR001573 | 0.5 | 82.3 | PR001609 | 1.12 | 81.6 |
| PR000300 | 0.677 | 96.61 | PR001574 | 0.88 | 81.1 | PR001610 | 1.23 | 80.2 |
| PR000301 | 0.882 | 96.18 | PR001577 | 0.61 | 81 | PR000403 | 0.42 | 81.4 |
| PR000302 | 0.64 | 96.72 | PR001572 | 1.4 | 80.7 | PR000404 | 0.6 | 81.1 |
| PR000303 | 0.695 | 95.88 | PR001575 | 1.74 | 81.7 | PR000416 | 0.27 | 79.8 |
| | | | PR001578 | 1.69 | 81.4 | | | |

| | |
|---|---|
| Experiment 1 | Experiment 2 |

### Example 3.9. Superantigen SEB Stimulation Assay

[0532] This example is intended to investigate the activation effect of PD-L1×CTLA4 bispecific antibody molecules on peripheral blood mononuclear cells (PBMCs). In the first step, the isolated human PBMC cells (MT-Bio) were firstly added to a 96-well plate (Corning, #3799) at 100 μL/well (1×10⁵ cells/well). Then, the antibody molecules at different concentrations were added at 100 μL/well, wherein the antibody concentrations may be the final concentration of (100 nM, 10 nM, 1 nM, 0.1 nM, 0.01 nM), or a concentration obtained by mixing two antibodies in a certain ratio, and two duplicate wells were set for each concentration. hIgG1 iso (CrownBio, #C0001) was used as an isotype control. The mixture was incubated at 37° C. for 30 min. Thereafter, the superantigen staphylococcal enterotoxin B (SEB) was added at 50 μL/well to make a final concentration of 100 ng/mL or 10 ng/mL. The cells were incubated in an incubator at 37° C. with 5% CO₂ for 96 h or 120 h, and the supernatant was collected. In the second step, the concentration of IL-2 in the collected supernatant was determined using an IL-2 ELISA kit (Biolegend, #431805), and the procedures were as described in the specification of the kit. The data were processed and analyzed by plotting using a GraphPad Prism 8 software.

[0533] In this example, the anti-CTLA4 HCAb monoclonal antibody PR000184 and anti-PD-L1 IgG monoclonal antibody PR000416 were used as positive control molecules.

[0534] As shown in FIG. 12 to FIG. 15, when stimulated with SEB, the anti-CTLA4 monoclonal antibody molecules, anti-PD-L1 monoclonal antibody molecules and PD-L1×CTLA4 bispecific antibody molecules were all able to promote T cells to product IL-2 to different degrees, and their T cell activation ability was related to their structures.

[0535] As shown in FIG. 12, the bispecific antibody molecules of IgG-VH tetravalent symmetric structures were able to activate T cells to produce IL-2. Moreover, the bispecific antibody molecule with a structure in which VH of anti-CTLA4 was at the N-terminus of IgG (PR000301) had stronger T cell activation ability than the bispecific antibody molecules with structures in which VH of anti-CTLA4 was at the C-terminus of IgG (PR000302 and PR000303).

[0536] As shown in FIG. 13, the bispecific antibody molecules of Fab-HCAb symmetric structures were able to activate T cells to produce IL-2. Moreover, PR000404 had stronger T cell activation ability than PR000403. PR000404 and PR000403 had similar structures, the only difference between which was that PR000404 had a normal Fc region of human IgG1, while PR000403 had three point mutations (L234A, L235A, and P329G) in the Fc region to reduce Fc-related effector functions. It is speculated that PR000404 can clear Treg cells by CTLA4-mediated ADCC, thereby further enhancing the functions of T cells.

[0537] As shown in FIG. 14, the bispecific antibody molecules PR000300 and PR000301 had comparable or even stronger T cell activation ability than the anti-CTLA4 monoclonal antibody, the anti-PD-L1 monoclonal antibody and a 1:1 concentration combination thereof (using the same donor PBMC in the same experiment allows for comparison of the absolute values of IL-2 levels).

[0538] As shown in FIG. 15, the bispecific antibody molecules PR000303 (of an IgG_HC-VH structure, i.e., VH at the C-terminus of the heavy chain of IgG) and PR000404 (of a Fab-HCAb structure) had weaker T cell activation ability than the anti-CTLA4 HCAb monoclonal antibody PR000184. This indicates that the CTLA4 end will have weakened activity in those two structures as compared to its presence in normal IgG or HCAb bivalent structures, so that its dose-related toxicity can be reduced for suitable use in current combination drug doses in the clinic.

### Example 3.10. Mixed Lymphocyte Reaction (MLR)

[0539] This example is intended to investigate the T cell activation effect of PD-L1×CTLA4 bispecific antibody molecules by the mixed lymphocyte reaction (MLR). In the first step, the recombinant human interleukin 4 (IL-4, R&D Systems, #204-GMP) and the recombinant human GM-CSF (R&D Systems, #215-GM) were added to the first donor PBMC cells (MT-Bio). After 6 days of induction, immature human CD14⁺ dendritic cells (iDC cells) were obtained. 1 μg/mL lipopolysaccharide (LPS, Sigma, #L2630) was then added, and after 24 h of induction, mature dendritic cells (mDC cells) were obtained. In the second step, T lymphocytes were isolated from the second donor PBMC cells (MT-Bio) using a T cell isolation kit (StemCell, #17951). In the third step, the obtained T cells and mDC cells were seeded in a 96-well plate (T cells at 1×10⁵/well and mDC cells at 1×10⁴/well) at a ratio of 10:1. Then, antibody molecules at different concentrations were added at 100 μL/well, wherein the antibody concentrations may be the final concentration of (100 nM, 10 nM, 1 nM, 0.1 nM, 0 nM), or a concentration obtained by mixing two antibodies in a certain ratio, and two duplicate wells were set for each concentration. hIgG1 iso (CrownBio, #C0001) was used as an isotype control. The cells were incubated in an incubator at 37° C. with 5% CO₂ for 5 days. In the fourth step, supernatants on day 3 and on day 5 were each collected. The IL-2 concentration in the 3-day supernatant was determined using an IL-2 ELISA kit (Thermo, #88-7025-88), and the IFN-γ concentration in the 5-day supernatant was determined using an IFN-γ ELISA kit (Thermo, #88-7316-88).

[0540] As shown in FIG. 16, in two independent MLR experiments (with different donor pairings), the bispecific antibody molecules PR000300 and PR000301 (VH at the N-terminus of the heavy or light chain of IgG) both showed stronger T cell activation than the anti-CTLA4 monoclonal antibody, anti-PD-L1 monoclonal antibody and a 1:1 concentration combination thereof, and were able to better promote the production of IL-2 and IFN-γ.

[0541] As shown in FIG. 17, when VH of anti-CTLA4 was at the C-terminus of the heavy or light chain of IgG, the bispecific antibody molecules PR000302 and PR000303 showed stronger T cell activation ability than the anti-PD-L1 monoclonal antibody atezolizumab in the MLR experiment.

### Example 3.11. Anti-Tumor Efficacy of Bispecific Antibody Molecules

[0542] In this study, in order to evaluate the in vivo anti-tumor effect of PD-L1×CTLA4 antibody, female B6-PD1/CTLA4 transgenic mice aged 6-8 weeks were subcutaneously inoculated with MC38-hPDL1 cells (human PD-L1 was overexpressed on MC38 cells). When the mean tumor value reached about 100 mm³, tumor-bearing mice were grouped according to tumor volume, and then the antibody drug diluted with PBS at a specific concentration was administered intraperitoneally (i.p.) at a specific dose and frequency. The dosing regimen used in this example: twice a week for a total of 8 doses (BIW×4 weeks). PBS was used as a blank control, 3 mg/kg PR001573 was used as a bispecific antibody administration group, and 3 mg/kg ipilimumab plus 3 mg/kg atezolizumab were used as a combination administration group. Tumor volume and body weight of mice were measured on days 6, 9, 12, 15, 19, 22, 26, 29 and 33 after tumor inoculation.

[0543] The tumor volume was calculated as follows:

tumor volume (mm³)=0.5×(long diameter of tumor×short diameter of tumor²).

[0544] As shown in FIG. 67, the control group had a tumor volume of about 700 mm³ at day 33 after tumor inoculation. The tumors of the combination administration group (3 mg/kg ipilimumab+3 mg/kg atezolizumab) completely regressed with a tumor growth inhibition (TGI) of 100%, which was significantly different from that of the control group (P=0.03). The tumors in the bispecific antibody administration group (3 mg/kg PR001573) completely regressed with a TGI of 100%, which was significantly different from that of the control group (P=0.03). Mice in the administration group were well tolerated throughout the experiment with no significant change in body weight. This indicates that the efficacy of 3 mg/kg PR001573 is comparable to that of the combination of ipilimumab and atezolizumab at an equal dose.

### Example 3.12. Summary

[0545] In this example, PD-L1×CTLA4 bispecific antibody molecules of a variety of structures were constructed using the antigen-binding domain Fab of the anti-PD-L1 IgG antibody and the antigen-binding domain VH of anti-CTLA4 HCAb antibody. This shows the flexibility of constructing a bispecific antibody molecular structure based on HCAb. By regulating the functional activity of PD-L1 and CTLA4 ends through different structure types, relative positions, binding valence and other parameters, different activity combinations are designed to meet the requirements of different dose combinations of combination drugs in the clinic.

[0546] For example, when VH of anti-CTLA4 antibody is at N-terminus of anti-PD-L1 IgG antibody, both PD-L1 end and CTLA4 end of the bispecific antibody molecules PR000300 and PR000301 can almost completely retain activity comparable to their parent monoclonal antibody, and those bispecific antibody molecules show comparable or even stronger T cell activation ability than the 1:1 concentration combination of the bispecific antibody molecule and parent monoclonal antibody in in vitro functional experiments such as mixed lymphocyte reaction and superantigen stimulation experiments. Therefore, this structure can be used to achieve a 1:1 dose combination of combination drugs. The mouse tumor efficacy model also proves that the bispecific antibody PR001573 of that structure has the same efficacy as the combination drugs.

[0547] For another example, when VH of anti-CTLA4 is at the C-terminus of anti-PD-L1 IgG or in Fab-HCAb structure, the PD-L1 ends of bispecific antibody molecules PR000302, PR000303 and PR000404 almost completely retain activity comparable to their parent monoclonal antibody, but the CTLA4 ends of those bispecific antibody molecules have weakened activity to different degrees. Therefore, this structure can be used to achieve a 3:1 or even 10:1 dose combination of combination drugs in the clinic.

### Example 4. HER2×CTLA4 Bispecific Antibodies

### Example 4.1. Background

[0548] Cytotoxic T lymphocyte-associated antigen 4 (CTLA4) is a negative regulator expressed on T cells. After binding to CD80 or CD86 on antigen presenting cells, the CTLA4 blocks the co-stimulatory signal of CD28 and simultaneously down-regulates the activity of T cells, thereby playing a role in immunosuppression. CTLA4-mediated inhibition mechanisms are often responsible for the escape of tumor cells from the immune system. By blocking the interaction between CTLA4 and its ligand, the activity of T cells can be restored, and the anti-tumor ability can be enhanced. Ipilimumab (trade name: Yervoy®) is the first anti-CTLA4 monoclonal antibody drugs approved for marketing, and is also the first product in t the era of tumor immunotherapy. Ipilimumab has a better therapeutic effect on the treatment of advanced melanoma, but also brings high immune-related side effects, with an incidence rate of the related grade 3-5 adverse reactions of up to 50%, which seriously influences its clinical application. The toxic and side effects of ipilimumab are mostly related to the CTLA4 targets, and in the current combination regimens of the PD-1/PD-L1 inhibitor and the CTLA4 inhibitor, the CTLA4 inhibitor, whether ipilimumab or tremelimumab, is usually selected at a lower dose.

[0549] In order to reduce the toxic and side effects of CTLA4 inhibitors, one of the methods worth trying is the targeted delivery of CTLA4 inhibitors into tumor tissues, so that the relevant T cell-mediated responses are limited to the tumor microenvironment, thereby reducing the risk of cytokine release syndrome. This targeted delivery can be achieved by intratumoral injection of CTLA4 inhibitors, but the intratumoral injection method involves both the risk of surgical operation and is limited to some superficial accessible tumor tissues. This example provides another targeted delivery method, in which antibodies that recognize tumor-associated antigens were used to redirect CTLA4 inhibitors into a specific tumor microenvironment where they can relieve T cell immunosuppressive signals and restore T cell function.

[0550] In this example, we constructed bispecific antibodies targeting both HER2 and CTLA4 to improve anti-tumor efficacy and safety through one or more mechanisms of action. Firstly, the HER2×CTLA4 bispecific antibody activates T cells by blocking the CTLA4 signaling pathway, while retaining the original mechanism of action of HER2 inhibitors (preventing dimerization of HER2, promoting internalization and degradation of HER2, and inhibiting downstream phosphorylation signals). Secondly, the HER2×CTLA4 bispecific antibody is enriched in tumor tissue highly expressing HER2 and can specifically relieve CTLA4 inhibition signals in a tumor microenvironment to activate T cells, so that toxic and side effects caused by non-specific activation of CTLA4 monoclonal antibodies in a peripheral system are reduced. Thirdly, the HER2×CTLA4 bispecific antibody can selectively retain Fc effector function (e.g., ADCC), thereby specifically killing inhibitory T cells highly expressing CTLA4 such as Treg cells by CTLA4 or specifically killing tumor cells highly expressing HER2 by HER2 in a tumor microenvironment. In addition, the bispecific antibody, as a drug product, is more advantageous in terms of economy and convenience of administration than the combination of two drug products.

### Example 4.2. Acquisition of Anti-HER2 IgG Antibodies and Anti-CTLA4 HCAb Antibodies

[0551] In this example, anti-HER2 IgG antibodies trastuzumab and pertuzumab were used, the corresponding amino acid sequences of which were derived from the IMGT database, see Table 4-11.

[0552] The fully human anti-CTLA4 HCAb antibody PR000184 (Table 4-11) used in this example was derived from Harbour HCAb mice, and was found as described in Example 3.2.2.

### Example 4.3. Construction of Bispecific Antibody Molecules Using Anti-HER2 IgG Antibodies and Anti-CTLA4 HCAb Antibodies

[0553] In this example, anti-HER2×CTLA4 bispecific antibody molecules of a variety of structures were constructed using the antigen-binding domain Fab of the anti-HER2 IgG antibody PR000210 (trastuzumab analog) or PR000672 (pertuzumab analog) and the antigen-binding domain VH of the anti-CTLA4 HCAb antibody PR000184.

[0554] In this and subsequent examples, the anti-HER2 IgG monoclonal antibody PR000210 (trastuzumab analog) or PR000672 (pertuzumab analog) was used as a positive control molecule, and was also the parent monoclonal antibody of the HER2 end of the HER2×CTLA4 bispecific antibody molecule.

[0555] In this and subsequent examples, the anti-CTLA4 HCAb monoclonal antibody PR000184 was used as a positive control molecule, and was also the parent monoclonal antibody of the CTLA4 end of the HER2×CTLA4 bispecific antibody molecule.

### Example 4.3.1. Construction of Molecules of Fab-HCAb Symmetric Structures

[0556] HER2×CTLA4 bispecific antibody molecules of Fab-HCAb symmetric structures were designed according to the structures described in Example 1.1 using anti-HER2 IgG antibodies and anti-CTLA4 heavy-chain antibodies, with the results summarized in Table 4-1. The antibody molecule samples were prepared and analyzed according to the method described in Example 2, with the results summarized in Table 4-2.

TABLE 4-1
HER2 × CTLA4 bispecific antibody molecules of Fab-HCAb symmetric structures

| | | | | First | Second | |
|---|---|---|---|---|---|---|
| | | | | linker | linker | |
| | | | | peptide | peptide | |
| | Bispecific | HER2 | CTLA4 | (between | (between | |
| Structure | antibody | antibody | antibody | Fab and | VH_B and | Fc type |
| No. | molecules | (Fab) | (VH_B) | VH_B) | CH2) | (mutation) |
| 1 | PR000305 | PR000210 | PR000184 | None | Human IgG1 | Human IgG1 |
| | | | | | hinge | |
| 1 | PR000653 | PR000210 | PR000184 | GS_7 | Human IgG1 | Human IgG1 |
| | | | | | hinge | |
| 1 | PR000654 | PR000210 | PR000184 | GS_15 | Human IgG1 | Human IgG1 |
| | | | | | hinge | |
| 1 | PR000655 | PR000210 | PR000184 | H1_15 | Human IgG1 | Human IgG1 |
| | | | | | hinge | |
| 1 | PR000656 | PR000210 | PR000184 | None | Human IgG1 | Human IgG1 |
| | | | | | hinge | |
| | | | | | (C220S) | |
| 1 | PR000658 | PR000210 | PR000184 | GS_15 | Human IgG1 | Human IgG1 |
| | | | | | hinge | |
| | | | | | (C220S) | |
| 1 | PR000659 | PR000210 | PR000184 | H1_15 | Human IgG1 | Human IgG1 |
| | | | | | hinge | |
| | | | | | (C220S) | |
| 1 | PR000706 | PR000210 | PR000184 | GS_7 | G5-LH | Human IgG1 |
| 1 | PR000716 | PR000210 | PR000184 | GS_15 | Human IgG1 | Human IgG1 |
| | | | | | hinge | (L234A, |
| | | | | | (C220S) | L235A, |
| | | | | | | P329G) |
| 1 | PR000717 | PR000210 | PR000184 | GS_15 | Human IgG1 | Human IgG1 |
| | | | | | hinge | (S239D, |
| | | | | | (C220S) | I332E) |

TABLE 4-2
Expression of HER2 × CTLA4 bispecific antibody
molecule proteins of Fab-HCAb symmetric structures

| | | | Plasmid | | |
|---|---|---|---|---|---|
| | Bispecific | | transfection ratio | Yield (mg/L) | |
| Structure | antibody | Expression system | (short chain:long | after first | SEC-HPLC |
| No. | molecules | and volume | chain) | purification | purity (%) |
| 1 | PR000305 | HEK293-F (30 ml) | 2:3 | 70.00 | 87.17 |
| 1 | PR000653 | HEK293-F (30 ml) | 3:2 | 69.85 | 100.00 |
| 1 | PR000654 | HEK293-F (30 ml) | 3:2 | 62.87 | 100.00 |
| 1 | PR000655 | HEK293-F (30 ml) | 3:2 | 102.14 | 97.82 |
| 1 | PR000656 | HEK293-F (30 ml) | 3:2 | 79.67 | 99.52 |
| 1 | PR000658 | HEK293-F (30 ml) | 3:2 | 77.33 | 97.10 |
| 1 | PR000659 | HEK293-F (30 ml) | 3:2 | 86.88 | 95.18 |
| 1 | PR000706 | HEK293-F (30 ml) | 3:2 | 40.87 | 100.00 |
| 1 | PR000716 | HEK293-F (30 ml) | 3:2 | 54.39 | 100.00 |
| 1 | PR000717 | HEK293-F (30 ml) | 3:2 | 38.33 | 100.00 |

### Example 4.3.2. Construction of molecules of IgG-VH tetravalent symmetric structure

[0557] HER2×CTLA4 bispecific antibody molecules of IgG-VH tetravalent symmetric structures were designed according to the structures described in Example 1.2 using anti-HER2 IgG antibodies and anti-CTLA4 heavy-chain antibodies, with the results summarized in Table 4-3. The antibody molecule samples were prepared and analyzed according to the method described in Example 2, with the results summarized in Table 4-4.

TABLE 4-3
HER2 × CTLA4 bispecific antibody molecules of IgG-VH tetravalent symmetric structures

| | | | | VH_B | | |
|---|---|---|---|---|---|---|
| | Bispecific | HER2 | CTLA4 | position | | |
| Structure | antibody | antibody | antibody | relative to | Linker | Fc type |
| No | molecules | (IgG) | (VH_B) | IgG | peptide | (mutation) |
| 5 | PR000539 | PR000210 | PR000184 | C-terminus of | L-GS_15-RT | Human IgG1 |
| | | | | heavy chain | | |
| 5 | PR000540 | PR000210 | PR000184 | C-terminus of | L-H1_15-RT | Human IgG1 |
| | | | | heavy chain | | |
| 5 | PR000714 | PR000210 | PR000184 | C-terminus of | L-GS_15-RT | Human IgG1 |
| | | | | heavy chain | | (L234A, L235A, |
| | | | | | | P329G) |
| 5 | PR000715 | PR000210 | PR000184 | C-terminus of | L-GS_15-RT | Human IgG1 |
| | | | | heavy chain | | (S239D, I332E) |
| 3 | PR001583 | PR000210 | PR000184 | N-terminus of | KL-H1_15- | Human IgG1 |
| | | | | heavy chain | RT | |
| 4 | PR001584 | PR000210 | PR000184 | N-terminus of | KL-H1_15- | Human IgG1 |
| | | | | light chain | AS | |
| 3 | PR001586 | PR000210 | PR000184 | N-terminus of | KL-H1_15- | Human IgG1 |
| | | | | heavy chain | RT | (S239D, I332E) |
| 4 | PR001974 | PR000210 | PR000184 | N-terminus of | KL-H1_15- | Human IgG1 |
| | | | | light chain | AS | (S239D, I332E) |
| 3 | PR001588 | PR000672 | PR000184 | N-terminus of | KL-H1_15- | Human IgG1 |
| | | | | heavy chain | RT | |
| 4 | PR001589 | PR000672 | PR000184 | N-terminus of | KL-H1_15- | Human IgG1 |
| | | | | light chain | AS | |
| 3 | PR001591 | PR000672 | PR000184 | N-terminus of | KL-H1_15- | Human IgG1 |
| | | | | heavy chain | RT | (S239D, I332E) |

TABLE 4-4
Expression of HER2 × CTLA4 bispecific antibody molecule
proteins of IgG-VH tetravalent symmetric structures

| | Bispecific | | Yield (mg/L) | |
|---|---|---|---|---|
| Structure | antibody | Expression system | after first | SEC-HPLC |
| No. | molecules | and volume | purification | purity (%) |
| 5 | PR000539 | HEK293-F (30 ml) | 188.33 | 100.00 |
| 5 | PR000540 | HEK293-F (30 ml) | 261.33 | 99.94 |
| 5 | PR000714 | HEK293-F (30 ml) | 34.33 | 98.21 |
| 5 | PR000715 | HEK293-F (30 ml) | 32.00 | 99.05 |
| 3 | PR001583 | HEK293-F (40 ml) | 153.25 | 96.07 |
| 4 | PR001584 | HEK293-F (40 ml) | 147.25 | 95.15 |
| 3 | PR001586 | HEK293-F (40 ml) | 112.50 | 96.26 |
| 4 | PR001974 | HEK293-F (40 ml) | 75.00 | 100 |
| 3 | PR001588 | HEK293-F (50 ml) | 35.21 | 100 |
| 4 | PR001589 | HEK293-F (50 ml) | 39.45 | 100 |
| 3 | PR001591 | HEK293-F (50 ml) | 25.94 | 100 |

### Example 4.3.3. Construction of Molecules of IgG-VH(2) Hexavalent Symmetric Structures

[0558] HER2×CTLA4 bispecific antibody molecules of IgG-VH(2) hexavalent symmetric structures were designed according to the structures described in Example 1.3 using anti-HER2 IgG antibodies and anti-CTLA4 heavy-chain antibodies, with the results summarized in Table 4-5. The antibody molecule samples were prepared and analyzed according to the method described in Example 2, with the results summarized in Table 4-6.

TABLE 4-5
HER2 × CTLA4 bispecific antibody molecules of
IgG-VH(2) hexavalent symmetric structures

| | | | | | Second linker | |
|---|---|---|---|---|---|---|
| | | | | First linker | peptide | |
| | Bispecific | HER2 | CTLA4 | peptide | (between | |
| Structure | antibody | antibody | antibody | (between Fc | VH_B and | Fc type |
| No. | molecules | (IgG) | (VH_B) | and VH_B) | VH_B) | (mutation) |
| 7 | PR000541 | PR000210 | PR000184 | L-GS_15-RT | GS_5 | Human |
| | | | | | | IgG1 |
| 7 | PR000542 | PR000210 | PR000184 | L-H1_15-RT | GS_5 | Human |
| | | | | | | IgG1 |
| 7 | PR001579 | PR000210 | PR000184 | L-H1 15-RT | GS_15 | Human |
| | | | | | | IgG1 |
| 7 | PR001580 | PR000210 | PR000184 | L-H1_15-RT | GS 20 | Human |
| | | | | | | IgG1 |
| 7 | PR001581 | PR000210 | PR000184 | L-H1_15-RT | H1_15 | Human |
| | | | | | | IgG1 |
| 7 | PR001582 | PR000210 | PR000184 | GS_15 | GS_5 | Human |
| | | | | | | IgG1 |
| | | | | | | (S239D, |
| | | | | | | I332E) |

TABLE 4-6
Expression of HER2 × CTLA4 bispecific antibody molecule
proteins of IgG-VH(2) hexavalent symmetric structures

| | Bispecific | | Yield (mg/L) | |
|---|---|---|---|---|
| Structure | antibody | Expression system | after first | SEC-HPLC |
| No. | molecules | and volume | purification | purity (%) |
| 7 | PR000541 | HEK293-F (30 ml) | 66 | 98.75 |
| 7 | PR000542 | HEK293-F (30 ml) | 125 | 99.83 |
| 7 | PR001579 | HEK293-F (40 ml) | 127 | 98.23 |
| 7 | PR001580 | HEK293-F (40 ml) | 120 | 98.04 |
| 7 | PR001581 | HEK293-F (40 ml) | 140 | 98.18 |
| 7 | PR001582 | HEK293-F (40 ml) | 39.5 | 98.19 |

### Example 4.3.4. Construction of Molecules of 2×VH-IgG Hexavalent Symmetric Structures

[0559] HER2×CTLA4 bispecific antibody molecules of 2×VH-IgG hexavalent symmetric structures were designed according to the structures described in Example 1.4 using anti-HER2 IgG antibodies and anti-CTLA4 heavy-chain antibodies, with the results summarized in Table 4-7. The antibody molecule samples were prepared and analyzed according to the method described in Example 2, with the results summarized in Table 4-8.

TABLE 4-7
HER2 × CTLA4 bispecific antibody molecules of
2 × VH-IgG hexavalent symmetric structures

| | | | | First linker | Second linker | |
|---|---|---|---|---|---|---|
| | | | | peptide | peptide | |
| | Bispecific | HER2 | CTLA4 | (between | (between | |
| Structure | antibody | antibody | antibody | VH_B and | VH_B and | Fc type |
| No. | molecules | (IgG) | (VH_B) | VL_A) | VH_A) | (mutation) |
| 9 | PR001585 | PR000210 | PR000184 | KL-H1_15- | KL-H1_15-RT | Human |
| | | | | AS | | IgG1 |
| 9 | PR001587 | PR000210 | PR000184 | KL-H1_15- | KL-H1_15-RT | Human |
| | | | | AS | | IgG1 |
| | | | | | | (S239D, |
| | | | | | | I332E) |
| 9 | PR001590 | PR000672 | PR000184 | KL-H1 15- | KL-H1_15-RT | Human |
| | | | | AS | | IgG1 |
| 9 | PR001592 | PR000672 | PR000184 | KL-H1_15- | KL-H1_15-RT | Human |
| | | | | AS | | IgG1 |
| | | | | | | (S239D, |
| | | | | | | I332E) |

TABLE 4-8
Expression of HER2 × CTLA4 bispecific antibody molecule proteins
of 2 × VH-IgG hexavalent symmetric structures

| | Bispecific | | Yield (mg/L) | |
|---|---|---|---|---|
| Structure | antibody | Expression system | after first | SEC-HPLC |
| No. | molecules | and volume | purification | purity (%) |
| 9 | PR001585 | HEK293-F (50 ml) | 27.6 | 100 |
| 9 | PR001587 | HEK293-F (50 ml) | 19.8 | 100 |
| 9 | PR001590 | HEK293-F (50 ml) | 8.2 | n.d. |
| 9 | PR001592 | HEK293-F (50 ml) | 6.4 | n.d. |

### Example 4.3.5. Construction of Molecules of Fab-Fc-VH(n) Bivalent or Trivalent Asymmetric Structures

[0560] HER2×CTLA4 bispecific antibody molecules of Fab-Fc-VH(n, n={1, 2}) asymmetric structures were designed according to the structures described in Example 1.5 and Example 1.6 using anti-HER2 IgG antibodies and anti-CTLA4 heavy-chain antibodies, with the results summarized in Table 4-9. The antibody molecule samples were prepared and analyzed according to the method described in Example 2, with the results summarized in Table 4-10.

TABLE 4-9
HER2 × CTLA4 bispecific antibody molecules
of Fab-Fc-VH(n) asymmetric structures

| | Bispecific | HER2 | CTLA4 | Structure | Number of | | Fc type of | Fc type of |
|---|---|---|---|---|---|---|---|---|
| Structure | antibody | antibody | antibody | of Fab | repetition n | Linker | Fab end | VH_B end |
| No. | molecules | (Fab) | (VH_B) | end | for VH_B | peptide | (mutation) | (mutation) |
| 11 | PR000916 | PR000210 | PR000184 | Normal | 1 | None | Human IgG1 | Human IgG1 |
| | | | | | | | (knob) | (hole) |
| 11 | PR000917 | PR000210 | PR000184 | Normal | 1 | None | Human IgG1 | Human IgG1 |
| | | | | | | | (knob, DE) | (hole, DE) |
| 14 | PR002666 | PR000210 | PR000184 | Normal | 2 | GS_5 | Human IgG1 | Human IgG1 |
| | | | | | | | (knob) | (hole) |
| 12 | PR002667 | PR000210 | PR000184 | Normal | 2 | GS_15 | Human IgG1 | Human IgG1 |
| | | | | | | | (knob) | (hole) |
| 4 | PR002668 | PR000210 | PR000184 | Normal | 2 | GS_5 | Human IgG1 | Human IgG1 |
| | | | | | | | (knob, DE) | (hole, DE) |
| 1 | PR002669 | PR000210 | PR000184 | Normal | 2 | GS_15 | Human IgG1 | Human IgG1 |
| | | | | | | | (knob, DE) | (hole, DE) |
| 18 | PR002670 | PR000210 | PR000184 | cross | 2 | GS_5 | Human IgG1 | Human IgG1 |
| | | | | Fd/LC | | | (knob) | (hole) |
| 18 | PR002671 | PR000210 | PR000184 | cross | 2 | GS_15 | Human IgG1 | Human IgG1 |
| | | | | Fd/LC | | | (knob) | (hole) |
| 18 | PR002672 | PR000210 | PR000184 | cross | 2 | GS_5 | Human IgG1 | Human IgG1 |
| | | | | Fd/LC | | | (knob, DE) | (hole, DE) |
| 18 | PR002673 | PR000210 | PR000184 | cross | 2 | GS_15 | Human IgG1 | Human IgG1 |
| | | | | Fd/LC | | | (knob, DE) | (hole, DE) |

[0561] (mutation code: Knob: S354C, T366W; Hole: Y349C, T366S, L368A, Y407V; DE: S239D, I332E.)

TABLE 4-10
Expression of HER2 × CTLA4 bispecific antibody
molecule proteins of Fab-Fc-VH(n) asymmetric structures

| | Bispecific | | Plasmid | Yield (mg/L) | |
|---|---|---|---|---|---|
| Structure | antibody | Expression system | transfection ratio | after first | SEC-HPLC |
| No. | molecules | and volume | (chain 2:3:1) | purification | purity (%) |
| 11 | PR000916 | HEK293-F (50 ml) | 1:1:1 | 30.4 | 98.54 |
| 11 | PR000917 | HEK293-F (50 ml) | 1:1:1 | 13.9 | 97.62 |
| 14 | PR002666 | HEK293-F (40 ml) | 3:2:5 | 147.8 | 79.59 |
| 14 | PR002667 | HEK293-F (40 ml) | 3:2:5 | 196.5 | 79.31 |
| 14 | PR002668 | HEK293-F (40 ml) | 3:2:5 | 10.8 | 82.76 |
| 14 | PR002669 | HEK293-F (40 ml) | 3:2:5 | 35.5 | 70 |
| 18 | PR002670 | HEK293-F (40 ml) | 3:2:5 | 94.8 | 74.19 |
| 18 | PR002671 | HEK293-F (40 ml) | 3:2:5 | 150 | 76.19 |
| 18 | PR002672 | HEK293-F (40 ml) | 3:2:5 | 3 | 84.9 |
| 18 | PR002673 | HEK293-F (40 ml) | 3:2:5 | 8 | 81.31 |

### Example 4.3.6. Sequences of HER2×CTLA4 Bispecific Antibody Molecules and Control Molecules

[0562] The sequence numbers corresponding to the sequences of the HER2×CTLA4 bispecific antibody molecules constructed in this example, the corresponding parent monoclonal antibody molecules such as the HER2 monoclonal antibody and the CTLA4 monoclonal antibody, and the control molecules are listed in Table 4-11, Table 4-12 and Table 4-13. The structure numbers in Table 4-13 correspond to those in Table 1-1 and FIG. 1. The sequence numbers of the corresponding CDR sequences of the first and second antigen-binding domains of the bispecific antibody molecules are listed in Table 4-14.

TABLE 4-11
Control molecules and parent monoclonal antibodies

| Antibody | |
|---|---|
| No. | Antibody |
| PR000210 | Anti-HER2 monoclonal antibody trastuzumab analog, hIgG1 |
| PR000672 | Anti-HER2 monoclonal antibody pertuzumab analog, hIgG1 |
| PR000184 | Anti-CTLA4 heavy-chain antibody CL5v3, hIgG1 |
| PR000218 | Anti-CTLA4 heavy-chain antibody CL5v3, |
| | hIgG1(S239D, I332E) |

TABLE 4-12
Sequence numbers of sequences and CDR sequences
of control molecules and parent monoclonal antibodies

| Antibody | Light | Heavy | | | | | | | | |
|---|---|---|---|---|---|---|---|---|---|---|
| No. | chain | chain | VL | VH | LCDR1 | LCDR2 | LCDR3 | HCDR1 | HCDR2 | HCDR3 |
| PR000210 | 351 | 305 | 286 | 238 | 171 | 190 | 215 | 19 | 67 | 127 |
| PR000672 | 359 | 315 | 293 | 247 | 176 | 196 | 220 | 23 | 74 | 132 |
| PR000184 | None | 303 | None | 236 | None | None | None | 17 | 65 | 125 |
| PR000218 | None | 306 | None | 236 | None | None | None | 17 | 65 | 125 |

TABLE 4-13
Sequence numbers of HER2 × CTLA4 bispecific
antibody molecules of this example

| Structure | Antibody | Polypeptide | Polypeptide | Polypeptide |
|---|---|---|---|---|
| No. | No. | chain 1 | chain 2 | chain 3 |
| 1 | PR000305 | 367 | 368 | None |
| 5 | PR000539 | 351 | 374 | None |
| 5 | PR000540 | 351 | 375 | None |
| 7 | PR000541 | 351 | 376 | None |
| 7 | PR000542 | 351 | 377 | None |
| 1 | PR000653 | 367 | 378 | None |
| 1 | PR000654 | 367 | 379 | None |
| 1 | PR000655 | 367 | 380 | None |
| 1 | PR000656 | 367 | 381 | None |
| 1 | PR000658 | 367 | 382 | None |
| 1 | PR000659 | 367 | 383 | None |
| 1 | PR000706 | 367 | 385 | None |
| 5 | PR000714 | 351 | 386 | None |
| 5 | PR000715 | 351 | 387 | None |
| 1 | PR000716 | 367 | 388 | None |
| 1 | PR000717 | 367 | 389 | None |
| 11 | PR000916 | 351 | 391 | 390 |
| 11 | PR000917 | 351 | 393 | 392 |
| 7 | PR001579 | 351 | 397 | None |
| 7 | PR001580 | 351 | 398 | None |
| 7 | PR001581 | 351 | 399 | None |
| 7 | PR001582 | 351 | 400 | None |
| 3 | PR001583 | 351 | 401 | None |
| 4 | PR001584 | 402 | 305 | None |
| 9 | PR001585 | 402 | 401 | None |
| 3 | PR001586 | 351 | 403 | None |
| 9 | PR001587 | 402 | 403 | None |
| 3 | PR001588 | 359 | 404 | None |
| 4 | PR001589 | 405 | 315 | None |
| 9 | PR001590 | 405 | 404 | None |
| 3 | PR001591 | 359 | 406 | None |
| 9 | PR001592 | 405 | 406 | None |
| 4 | PR001974 | 402 | 409 | None |
| 14 | PR002666 | 351 | 391 | 434 |
| 14 | PR002667 | 351 | 391 | 435 |
| 14 | PR002668 | 351 | 393 | 436 |
| 14 | PR002669 | 351 | 393 | 437 |
| 18 | PR002670 | 367 | 438 | 434 |
| 18 | PR002671 | 367 | 438 | 435 |
| 18 | PR002672 | 367 | 439 | 436 |
| 18 | PR002673 | 367 | 439 | 437 |

TABLE 4-14
Sequence numbers of CDRs of antigen-binding domains
of HER2 × CTLA4 bispecific antibody molecules

| | | Antigen- | | | | | | |
|---|---|---|---|---|---|---|---|---|
| Structure | | binding | | | | | | |
| No. | Antibody No. | domain No. | LCDR1 | LCDR2 | LCDR3 | HCDR1 | HCDR2 | HCDR3 |
| 1 | PR000305, PR000653, | #1 | 171 | 190 | 215 | 19 | 67 | 127 |
| | PR000656, PR000658, | #2 | None | None | None | 17 | 65 | 125 |
| | PR000659, PR000706, | | | | | | | |
| | PR000716, PR000717 | | | | | | | |
| | PR000654, PR000655, | | | | | | | |
| 3 | PR001583, PR001586 | #1 | 171 | 190 | 215 | 19 | 67 | 127 |
| | | #2 | None | None | None | 17 | 65 | 125 |
| 3 | PR001588, PR001591 | #1 | 176 | 196 | 220 | 23 | 74 | 132 |
| | | #2 | None | None | None | 17 | 65 | 125 |
| 4 | PR001584, PR001974 | #1 | 171 | 190 | 215 | 19 | 67 | 127 |
| | | #2 | None | None | None | 17 | 65 | 125 |
| 4 | PR001589 | #1 | 176 | 196 | 220 | 23 | 74 | 132 |
| | | #2 | None | None | None | 17 | 65 | 125 |
| 5 | PR000539, PR000540, | #1 | 171 | 190 | 215 | 19 | 67 | 127 |
| | PR000714, PR000715 | #2 | None | None | None | 17 | 65 | 125 |
| 7 | PR000541, PR000542, | #1 | 171 | 190 | 215 | 19 | 67 | 127 |
| | PR001581, PR001582 | #2 | None | None | None | 17 | 65 | 125 |
| | PR001579, PR001580, | | | | | | | |
| 9 | PR001585, PR001587 | #1 | 171 | 190 | 215 | 19 | 67 | 127 |
| | | #2 | None | None | None | 17 | 65 | 125 |
| 9 | PR001590, PR001592 | #1 | 176 | 196 | 220 | 23 | 74 | 132 |
| | | #2 | None | None | None | 17 | 65 | 125 |
| 11 | PR000916, PR000917 | #1 | 171 | 190 | 215 | 19 | 67 | 127 |
| | | #2 | None | None | None | 17 | 65 | 125 |
| 14 | PR002666, PR002667, | #1 | 171 | 190 | 215 | 0 | 67 | 127 |
| | PR002668, PR002669 | #2 | None | None | None | 17 | 65 | 125 |
| 18 | PR002670, PR002671, | #1 | 171 | 190 | 215 | 19 | 67 | 127 |
| | PR002672, PR002673 | #2 | None | None | None | 17 | 65 | 125 |

### Example 4.4. Binding to CTLA4

[0563] This example is intended to investigate the binding activity of the HER2×CTLA4 bispecific antibody molecules to CTLA4.

### Example 4.4.1. Binding to CHO-K1 Cells CHO-K1/hCTLA4 Highly Expressing Human CTLA4

[0564] The binding ability of the antibody molecules to a CHO-K1 cell line CHO-K1/hCTLA4 cells (ChemPartner) and other cells highly expressing human CTLA4 was determined by flow cytometry FACS. Specifically, CHO-K1/hCTLA4 cells were digested and resuspended in an F12K medium, with the cell density adjusted to 2×10⁶ cells/mL. Thereafter, the CHO-K1/hCTLA4 cells were seeded in a 96-well V-bottom plate (Corning, #3894) at 100 μL/well and centrifuged at 4° C. for 5 min, and the supernatant was discarded. Then, the antibody molecules at a total of 8 concentrations obtained by a 5-fold gradient dilution from the highest final concentration of 300 nM, or a total of 12 concentrations obtained by a 4-fold gradient dilution from the highest final concentration of 300 nM were added to the 96-well plate at 100 μL/well, and the mixture was mixed well. hIgG1 iso (CrownBio, #C0001) was used as an isotype control. The cells were incubated at 4° C. for 1 h away from light. Then, the cells in each well were rinsed twice with 100 μL of pre-cooled FACS buffer (PBS buffer containing 0.5% BSA) and centrifuged at 500 g at 4° C. for 5 min, and then the supernatant was discarded. Thereafter, a fluorescent secondary antibody (Goat human IgG (H+L) Alexa Fluor 488 conjugation, Thermo, #A11013, 1:1000 dilution) was added at 100 μL/well, and the plate was incubated at 4° C. for 1 h away from light. Then, the cells in each well were then rinsed twice with 200 μL of pre-cooled FACS buffer and centrifuged at 500 g at 4° C. for 5 min, and then the supernatant was discarded. Finally, a pre-cooled FACS buffer was added at 200 μL/well to resuspend the cells. Fluorescence signal values were read using a BD FACS CANTOII flow cytometer or an ACEA NovoCyte flow cytometer, and the data were processed and analyzed using FlowJo v10 (FlowJo, LLC) software. The data were processed and analyzed by plotting using GraphPad Prism 8 software, and binding curves of the antibodies to target cells, EC₅₀ values and other parameters were obtained through four-parameter nonlinear fitting.

[0565] In this example, the anti-CTLA4 HCAb monoclonal antibody PR000184 was used as a positive control molecule, and was also the parent monoclonal antibody of the CTLA4 end of the HER2×CTLA4 bispecific antibody molecule. The results are shown in FIG. 18 and Table 4-15.

[0566] As shown in FIG. 18 (A), the bispecific antibody molecules of Fab-HCAb symmetric structures were all able to bind to CTLA4. Those molecules had similar structures and were all composed of the Fab domain of anti-HER2 monoclonal antibody PR000210 and the VH domain of anti-CTLA4 HCAb monoclonal antibody PR000184, with minor differences in the different first linker peptides and hinge regions linking Fc, and different Fc types or mutations. Thus, those bispecific antibody molecules had similar binding ability to CTLA4. They had EC₅₀ values for binding to CTLA4 that were similar to or 1.5-3 times poorer than the parent monoclonal antibody PR000184, but had lower maximum binding signals (maximum MFIs) on FACS than the parent monoclonal antibody PR000184. This may suggest that in a Fab-HCAb structure, the Fab domain may have a “masking” effect on the VH domain of HCAb, so that the VH domain in this structure is able to bind to less CTLA4 molecules than it would be at the free end, but its binding potency is comparable to that of the parental monoclonal antibody PR000184 (EC₅₀ value) for the same number of available CTLA4 molecules.

[0567] As shown in FIG. 18 (B-D), the bispecific antibody molecules of IgG-VH tetravalent symmetric structures had slightly different binding ability to CTLA4 according to their specific molecular structures. The bispecific antibody molecules of such structures were further classified into three classes according to the position of the VH end of anti-CTLA4 relative to anti-HER2 IgG in the bispecific antibody structure: VH at the C-terminus of the heavy chain of IgG (PR000539, PR000540, PR000714, and PR000715); VH at the N-terminus of the heavy chain of IgG (PR001583, PR001586, PR001588, and PR001591); and VH at the N-terminus of the light chain of IgG (PR001584 and PR001589). When VH was at the C-terminus of the heavy chain of IgG, those bispecific antibody molecules had similar EC₅₀ values for binding to CTLA4 to the parent monoclonal antibody PR000184, but had slightly lower maximum MFIs on FACS than the parent monoclonal antibody PR000184. When VH was at the N-terminus of either the heavy or light chain of IgG, those bispecific antibody molecules had slightly poorer EC₅₀ values for binding to CTLA4 than the parent monoclonal antibody PR000184, but had superior maximum MFIs on FACS than the parent monoclonal antibody PR000184. This indicates that the number and binding potency of VH-binding target molecules can be modulated by adjusting the relative position of VH on IgG.

[0568] As shown in FIG. 18 (E-F), the bispecific antibody molecules of IgG-VH-VH hexavalent symmetric structures were all able to bind to CTLA4. Those molecules have similar structures and were all composed of anti-HER2 monoclonal antibody PR000210 and the VH domain of anti-CTLA4 HCAb monoclonal antibody PR000184, with minor differences in the different first linker peptides and second linker peptides, and different Fc types or mutations. With the exception of PR001582, those bispecific antibody molecules had similar binding ability to CTLA4 to the parental monoclonal antibody PR000184 (similar EC₅₀ values and similar maximum MFIs).

[0569] As shown in FIG. 18 (G-H), the bispecific antibody molecules of 2×VH-IgG hexavalent symmetric structures were all able to bind to CTLA4. Those molecules had similar structures and were all composed of anti-HER2 monoclonal antibody PR000210 or PR000672 and the VH domain of anti-CTLA4 HCAb monoclonal antibody PR000184. The bispecific antibody molecules (PR001585 and PR001587) constructed based on the parent monoclonal antibody PR000210 had similar binding ability to CTLA4 to the parent monoclonal antibody PR000184; and the bispecific antibody molecules (PR001590 and PR001592) constructed based on the parent monoclonal antibody PR000672 had slightly weaker binding ability to CTLA4 than the parent monoclonal antibody PR000184.

[0570] As shown in FIG. 18 (I-J), the binding ability of the bispecific antibody molecules of Fab-Fc-VH (n, n=1, 2) asymmetric structures to CTLA4 was related to the number of VH domains of the parent monoclonal antibody PR000184 contained in the structure. The bispecific antibody molecules PR000916 and PR000917 both contained only one CTLA4-binding domain, so that their binding ability to CTLA4 was significantly weaker than that of the bivalent parent monoclonal antibody PR000184. The bispecific antibody molecule PR002672 contained two CTLA4-binding domains formed in tandem, and its binding ability to CTLA4 was similar to that of the parent monoclonal antibody PR000184. This structure shows that bispecific antibody molecules containing the VH domain derived from HCAb have such flexibility that: the binding ability to the target is modulated by adjusting the number of VH domains in tandem.

TABLE 4-15
Binding to CHO-K1/hCTLA4

| Antibody | EC₅₀ (nM) | Maximum MFI | Antibody | EC₅₀ (nM) | Maximum MFI | Antibody | EC₅₀ (nM) | Maximum MFI |
|---|---|---|---|---|---|---|---|---|
| PR000184 | 1.588 | 214.1 | PR000184 | 1.792 | 1083 | PR000184 | 3.046 | 2167 |
| PR000305 | 5.016 | 157.1 | PR001583 | 4.426 | 1934 | PR002672 | 2.785 | 1804 |
| PR000653 | 2.507 | 156.1 | PR001584 | 4.531 | 1524 | | | |
| PR000654 | 1.612 | 154.2 | PR001586 | 6.131 | 1861 | | | |
| PR000655 | 1.866 | 147.7 | PR001588 | 7.257 | 2168 | | | |
| PR000656 | 3.421 | 144 | PR001589 | 9.39 | 1866 | | | |
| PR000658 | 1.491 | 148.1 | PR001591 | 5.149 | 2074 | | | |
| PR000659 | 1.943 | 158.8 | PR001579 | 3.193 | 1078 | | | |
| PR000706 | 2.108 | 141.3 | PR001580 | 2.649 | 1078 | | | |
| PR000716 | 1.395 | 130.6 | PR001581 | 3.469 | 1074 | | | |
| PR000717 | 1.344 | 129.9 | PR001582 | 22.83 | 1034 | | | |
| PR000539 | 1.703 | 148.3 | PR001585 | 1.585 | 1051 | | | |
| PR000540 | 2.029 | 185.3 | PR001587 | 1.717 | 1044 | | | |
| PR000714 | 1.64 | 146.5 | PR001590 | 5.444 | 1048 | | | |
| PR000715 | 1.864 | 143 | PR001592 | 10.4 | 1299 | | | |
| PR000541 | 1.711 | 203.2 | | | | | | |
| PR000542 | 1.766 | 235.2 | | | | | | |
| PR000916 | 4.681 | 150.9 | | | | | | |
| PR000917 | 9.803 | 142.1 | | | | | | |

| | | |
|---|---|---|
| Experiment 1 | Experiment 2 | Experiment 3 |

### Example 4.5. Blocking the Binding of CTLA4 to its Ligand

[0571] This example is intended to investigate the inhibitory activity of the HER2×CTLA4 bispecific antibody molecules for the binding of CTLA4 to its ligand B7-1/CD80.

### Example 4.5.1. Blocking the Binding of Human CTLA4 Protein to its Ligand Protein

[0572] The inhibitory activity of the antibody molecules for the binding of human CTLA4 protein to its ligand B7-1/CD80 protein was determined by enzyme-linked immunosorbent assay (ELISA). Specifically, a 96-well plate was firstly coated with 2 μg/mL protein human B7-1-Fc (ACRO Biosystems, #B71-H5259) at 100 μL/well and placed at 4° C. overnight. The plate was then rinsed 3 times with a PBST buffer (a PBS buffer containing 0.05% Tween-20), added with a blocking buffer (a PBS buffer containing 5% skim milk powder), and incubated at 37° C. for 1 h. Then, the antibody molecules at a total of 7 concentrations obtained by a 3-fold gradient dilution with the highest final concentration of 200 nM were added at 90 μL/well. The mixture was mixed well and incubated at 37° C. for 20 min. hIgG1 iso (CrownBio, #C0001) was used as an isotype control. Then, biotinylated human CTLA4-Fc protein (ACRO Biosystems, #CT4-H82F3) was added at 10 μL/well to make a final concentration of 0.25 μg/mL, and the mixture was incubated at 37° C. for 1 h. The plate was then rinsed 3 times with a PBST buffer. Then, a label Precision Protein™ StrepTactin-HRP conjugate (Bio-RAD, #1610380, diluted in a 1:4000 ratio) was added at 100 μL/well, and the mixture was incubated at 37° C. for 0.5 h. The plate was then rinsed 3 times with a PBST buffer. Then, TMB chromogenic solution was added at 100 μL/well for reaction for 15 min. Finally, a stop buffer was added to stop the reaction. The absorbance value (OD value) was read at 490 nM using an Enspire™ multifunctional microplate reader (Perkin Elmer, Inc.). The data were processed and analyzed by plotting using GraphPad Prism 8 software, and inhibition curves, IC₅₀ values and other parameters were obtained through four-parameter nonlinear fitting.

[0573] In this example, the anti-CTLA4 HCAb monoclonal antibody PR000184 was used as a positive control molecule, and was also the parent monoclonal antibody of the CTLA4 end of the HER2×CTLA4 bispecific antibody molecule. The results are shown in FIG. 19 and Table 4-16.

[0574] As shown in FIG. 19 (A), the bispecific antibody molecules of Fab-HCAb symmetric structures all had ability (inhibitory activity) to block the binding of CTLA4 protein to its ligand protein, which was similar to or slightly weaker than that of the parent monoclonal antibody PR000184, as evidenced by the similar maximum OD difference values, but the IC₅₀ values that were slightly poorer by only 1.5-2.1 times.

[0575] As shown in FIG. 19 (B-D), the bispecific antibody molecules of IgG-VH tetravalent symmetric structures had slightly different inhibitory activity according to their specific molecular structures. The bispecific antibody molecules of such structures were further classified into three classes according to the position of the VH end of anti-CTLA4 relative to anti-HER2 IgG in the bispecific antibody structure: VH at the C-terminus of the heavy chain of IgG (PR000539, PR000540, and PR000715); VH at the N-terminus of the heavy chain of IgG (PR001583, PR001586, PR001588, and PR001591); and VH at the N-terminus of the light chain of IgG (PR001584 and PR001589). When VH was at the C-terminus of the heavy chain of IgG, the inhibitory activity of those bispecific antibody molecules was slightly weaker than that of the parent monoclonal antibody, as evidence by the similar maximum OD difference values, but the IC₅₀ values that were slightly poorer by only 1.5-2.5 times. When VH was at the N-terminus of either the heavy or light chain of IgG, those bispecific antibody molecules had similar inhibitory activity to the parent monoclonal antibody.

[0576] As shown in FIG. 19 (E-F), the bispecific antibody molecules of IgG-VH-VH hexavalent symmetric structures had similar or slightly superior inhibitory activity to the parent monoclonal antibody.

[0577] As shown in FIG. 19 (G-H), the bispecific antibody molecules of 2×VH-IgG hexavalent symmetric structures had similar to or slightly superior inhibitory activity to the parent monoclonal antibody.

TABLE 4-16
Blocking the binding of human CTLA4 protein to B7-1 protein

| Antibody | IC₅₀ (nM) | Antibody | IC₅₀ (nM) | Antibody | IC₅₀ (nM) |
|---|---|---|---|---|---|
| PR000184 | 2.464 | PR000184 | 1.687 | PR001579 | 1.152 |
| PR000654 | 5.307 | PR001583 | 2.426 | PR001580 | 1.132 |
| PR000655 | 4.024 | PR001584 | 2.762 | PR001581 | 1.145 |
| PR000539 | 5.406 | PR001586 | 2.012 | PR001582 | 2.149 |
| PR000540 | 6.374 | PR001588 | 2.197 | PR001585 | 1.306 |
| PR000715 | 6.281 | PR001589 | 2.588 | PR001587 | 1.455 |
| PR000541 | 3.314 | PR001591 | 2.703 | PR001590 | 1.985 |
| PR000542 | 2.816 | PR000541 | 1.718 | PR001592 | 3.213 |

| | |
|---|---|
| Experiment 1 | Experiment 2 |

### Example 4.5.2. Blocking the Binding of Human CTLA4 Cell to its Ligand Protein

[0578] The inhibitory activity of the antibody molecules for the binding of cells expressing CTLA4 to the ligand B7-1/CD80 of CTLA4 was determined by flow cytometry FACS. Specifically, a CHO-K1 cell line CHO-K1/hCTLA4 (ChemPartner) highly expressing human CTLA4 was digested and resuspended in an FACS buffer (a PBS buffer containing 2% FBS), with the cell density adjusted to 3×10⁶ cells/mL. The CHO-K1/hCTLA4 cells were seeded in a 96 well plate (3×10⁵ cells/well) at 100 μL/well and centrifuged at 500 g at 4° C. for 5 min, and the supernatant was discarded. Then, the serially diluted antibody molecules were added to the 96-well plate at 100 μL/well, and the mixtures were well mixed. The antibody molecules might serially diluted 3-fold from the highest final concentration 200 nM to obtain a total of 8 concentrations. hIgG1 iso (CrownBio, #C0001) was used as an isotype control. Then, 3 μg/mL biotinylated ligand protein human B7-1-Fc-biotin (ACRO Biosystems, #B71-H82F2) was added to the 96-well plate at 100 μL/well, and the mixture was mixed well. The 96-well plate was incubated at 4° C. for 1 h away from light. Then, the cells in each well were rinsed twice with 200 μL of pre-cooled FACS buffer and centrifuged at 500 g at 4° C. for 5 min, and then the supernatant was discarded. Thereafter, a fluorescent label (Streptavidin, Alexa Fluor™ 488 conjugate, Thermo, #S32354, diluted in a 1:1000 ratio) was added at 100 μL/well, and the plate was incubated at 4° C. for 1 h away from light. Then, the cells in each well were rinsed three times with 200 μL of pre-cooled FACS buffer and centrifuged at 500 g at 4° C. for 5 min, and then the supernatant was discarded. Finally, a pre-cooled FACS buffer was added at 200 μL/well to resuspend the cells. Fluorescence signal values were read using a BD FACS CANTOII flow cytometer or an ACEA NovoCyte flow cytometer, and the data were processed and analyzed using FlowJo v10 (FlowJo, LLC) software. The data were processed and analyzed by plotting using GraphPad Prism 8 software to convert the fluorescence signal (MFI) into the inhibition rate, and inhibition curves, IC₅₀ values, the maximum inhibition rates and other parameters were obtained through four-parameter nonlinear fitting.

[0579] In this example, the anti-CTLA4 HCAb monoclonal antibody PR000184 was used as a positive control molecule, and was also the parent monoclonal antibody of the CTLA4 end of the HER2×CTLA4 bispecific antibody molecule. The results are shown in FIG. 20 and Table 4-17.

[0580] As shown in FIG. 20 (A-B), when VH of anti-CTLA4 was at the C-terminus of the heavy chain of anti-HER2 IgG, the bispecific antibody molecules of IgG-VH tetravalent symmetric structures had significantly reduced inhibitory activity, but the bispecific antibody molecules of IgG-VH-VH hexavalent symmetric structures (PR000541) had similar inhibitory activity to the parent monoclonal antibody.

[0581] As shown in FIG. 20 (C), the bispecific antibody molecule of a Fab-Fc-VH(2) asymmetric structure (PR002672) contained two CTLA4-binding domains formed in tandem, and in terms of inhibitory activity, it achieved nearly 100% inhibition as compared to the bivalent parent monoclonal antibody, although its IC₅₀ value was about 4 times poorer than that of the parent monoclonal antibody.

TABLE 4-17
Blocking the binding of human CTLA4 cell to B7-1 protein

| | | Maximum | | | Maximum |
|---|---|---|---|---|---|
| | | inhibition | | | inhibition |
| Antibody | IC₅₀ (nM) | rate (%) | Antibody | IC₅₀ (nM) | rate (%) |
| PR000184 | 1.685 | 99.62 | PR000184 | 0.239 | 99.42 |
| PR000539 | 9.0 | 88.02 | PR002672 | 0.983 | 98.97 |
| PR000715 | 10.24 | 89.82 | | | |
| PR000541 | 1.634 | 99.55 | | | |

| | |
|---|---|
| Experiment 1 | Experiment 2 |

### Example 4.6. Binding to HER2

[0582] This example is intended to investigate the binding activity of the HER2×CTLA4 bispecific antibody molecules to HER2.

### Example 4.6.1. Binding to SK-BR-3 Cells Highly Expressing Human HER2

[0583] The binding ability of the antibodies to a tumor cell line SK-BR-3 (ATCC, HTB-30) highly expressing human HER2 was determined by flow cytometry FACS. Specifically, the SK-BR-3 cells were digested and resuspended in a DMEM complete medium, with the cell density adjusted to 1×10⁶ cells/mL. Then, the cells were seeded in a 96-well V-bottom plate (Corning, #3894) at 100 μL/well and centrifuged at 4° C. for 5 min, and the supernatant was discarded. Then, the antibody molecules at a total of 8 concentrations obtained by a 5-fold gradient dilution with the highest final concentration of 100 nM were added at 100 μL/well. The mixture was mixed well. hIgG1 iso (CrownBio, #C0001) was used as an isotype control. The cells were incubated at 4° C. for 1 h away from light. Thereafter, the mixture was centrifuged at 4° C. for 5 min, and the supernatant was discarded. Then, the cells in each well were rinsed twice with 200 μL of pre-cooled FACS buffer (a PBS buffer containing 0.5% BSA), and centrifuged at 500 g at 4° C. for 5 min, and then the supernatant was discarded. Thereafter, a fluorescent secondary antibody (Goat human IgG (H+L) Alexa Fluor 488 conjugation, Thermo, #A11013, 1:1000 dilution) was added at 100 μL/well, and the plate was incubated at 4° C. for 1 h away from light. Then, the cells in each well were then rinsed twice with 200 μL of pre-cooled FACS buffer and centrifuged at 500 g at 4° C. for 5 min, and then the supernatant was discarded. Finally, a pre-cooled FACS buffer was added at 200 μL/well to resuspend the cells. Fluorescence signal values were read using a BD FACS CANTOII flow cytometer or an ACEA NovoCyte flow cytometer, and the data were processed and analyzed using FlowJo v10 (FlowJo, LLC) software. The data were processed and analyzed by plotting using GraphPad Prism 8 software, and binding curves of the antibodies to target cells, EC₅₀ values and other parameters were obtained through four-parameter nonlinear fitting.

[0584] In this example, the anti-HER2 monoclonal antibody PR000210 (trastuzumab analog) or PR000672 (pertuzumab analog) was used as a positive control molecule, and was also the parent monoclonal antibody of the HER2×CTLA4 bispecific antibody molecule. The results are shown in FIG. 21 and Table 4-18.

[0585] As shown in FIG. 21 (A), the bispecific antibody molecules of Fab-HCAb symmetric structures had similar binding ability to HER2 to the parent monoclonal antibody PR000210, which was reflected in similar EC₅₀ values and maximum MFIs. This indicates that the Fab end structure of anti-HER2 of the bispecific antibody molecule of a Fab-HCAb symmetric structure can well retain the binding ability to HER2.

[0586] As shown in FIG. 21 (B-E), the bispecific antibody molecules of IgG-VH tetravalent symmetric structures had slightly different binding ability to HER2 according to their specific molecular structures. The bispecific antibody molecules of such structures were further classified into three classes according to the position of the VH end of anti-CTLA4 relative to anti-HER2 IgG in the bispecific antibody structure: VH at the C-terminus of the heavy chain of IgG (PR000539 and PR000540); VH at the N-terminus of the heavy chain of IgG (PR001583, PR001586, PR001588, and PR001591); and VH at the N-terminus of the light chain of IgG (PR001584, PR001974, and PR001589). In terms of the EC₅₀ values, when VH was at the C-terminus of the heavy chain of IgG, the structure well retained the binding ability to HER2, indicating that the VH end has no significant effect on the Fab end of IgG; when VH was at the N-terminus of either the heavy or light chain of IgG, the binding ability of the bispecific antibody molecule to HER2 was reduced by 1.5-2.5 times as compared to that of the corresponding parent monoclonal antibody.

[0587] As shown in FIG. 21 (F-G), the bispecific antibody molecules of IgG-VH-VH hexavalent symmetric structures had similar binding ability to HER2 to the corresponding parental monoclonal antibody.

[0588] As shown in FIG. 21 (H-I), the bispecific antibody molecules of 2×VH-IgG hexavalent symmetric structures had significantly reduced binding ability to HER2 as compared to its corresponding parent monoclonal antibody, indicating that when VH is linked to the N-terminus of both the heavy and light chains of IgG, the function of Fab end of IgG is significantly affected.

[0589] As shown in FIG. 21 (J), the HER2-binding domain of the bispecific antibody molecule of a Fab-Fc-VH asymmetric structure (PR000916) was a monovalent Fab structure, but it had very similar binding ability to HER2 to the bivalent parent monoclonal antibody, indicating that the binding domain of trastuzumab has no significant difference in monovalent binding and bivalent binding, and the bispecific antibody molecule of a Fab-Fc-VH asymmetric structure well retains the binding ability to HER2.

TABLE 4-18
Binding to SK-BR-3

| | EC₅₀ | Maximum | | EC₅₀ | Maximum |
|---|---|---|---|---|---|
| Antibody | (nM) | MFI | Antibody | (nM) | MFI |
| PR000210 | 1.332 | 11868 | PR000210 | 2.929 | 31552 |
| PR000305 | 1.538 | 12604 | PR001583 | 3.915 | 32008 |
| PR000653 | 1.668 | 12781 | PR001584 | 7.502 | 32880 |
| PR000654 | 1.712 | 13168 | PR001586 | 4.717 | 35248 |
| PR000655 | 1.57 | 12201 | PR001579 | 3.056 | 36444 |
| PR000656 | 1.664 | 12358 | PR001580 | 3.421 | 35754 |
| PR000658 | 1.474 | 12964 | PR001581 | 3.687 | 34744 |
| PR000659 | 1.653 | 13672 | PR001582 | 3.665 | 30517 |
| PR000706 | 1.562 | 13355 | PR001585 | n.d. | 26700 |
| PR000716 | 1.386 | 13418 | PR001587 | n.d. | 26800 |
| PR000717 | 1.466 | 13684 | | | |
| PR000539 | 1.323 | 9460 | | | |
| PR000540 | 1.471 | 10894 | | | |
| PR000541 | 1.282 | 7378 | | | |
| PR000542 | 1.295 | 9019 | | | |
| | EC₅₀ | Maximum | | EC₅₀ | Maximum |
| Antibody | (nM) | MFI | Antibody | (nM) | MFI |
| PR000210 | 1.913 | 7692 | PR000210 | 1.863 | 10438 |
| PR000916 | 3.688 | 9874 | PR001586 | 2.975 | 9436 |
| | | | PR001974 | 4.119 | 8478 |

| | EC₅₀ | Maximum |
|---|---|---|
| Antibody | (nM) | MFI |
| PR000672 | 3.119 | 33400 |
| PR001588 | 8.445 | 37900 |
| PR001589 | 5.52 | 37100 |
| PR001591 | 6.861 | 35900 |
| PR001590 | n.d. | 34000 |
| PR001592 | n.d. | 32800 |

### Example 4.7. Superantigen SEB Stimulation Assay

[0590] This example is intended to investigate the activation effect of HER2×CTLA4 bispecific antibody molecules on peripheral blood mononuclear cells (PBMCs). In the first step, the isolated human PBMCs (MT-Bio) were firstly adjusted to 5×10⁶ cells/mL. Thereafter, PBMC was added to a 96-well plate (Corning, #3799) at 50 μL/well. Then, the antibody molecules at different concentrations were added at 100 μL/well, wherein the antibody concentrations may be the final concentration gradient of (150 nM, 30 nM, 1 nM) or (80 nM, 8 nM, 0.8 nM, 0.08 nM); and two duplicate wells were set for each concentration. hIgG1 iso (CrownBio, #C0001) was used as an isotype control. The mixture was incubated at 37° C. for 30 min. Thereafter, 400 ng/mL superantigen staphylococcal enterotoxin B (SEB) was added at 50 μL/well to make a final concentration of 100 ng/mL. The cells were incubated in an incubator at 37° C. with 5% CO₂ for 72 h or 96 h, and the supernatant was collected. In the second step, the concentration of IL-2 in the collected supernatant was determined using an IL-2 assay kit (Thermo, #88-7025-77). The data were processed and analyzed by plotting using a GraphPad Prism 8 software.

[0591] In this example, the anti-CTLA4 HCAb monoclonal antibody PR000184 or PR000218 was used as a positive control molecule, and was also the parent monoclonal antibody of the CTLA4 end of the HER2×CTLA4 bispecific antibody molecule. PR000218 was an ADCC-enhanced variant constructed by Fc mutation on the basis of PR000184.

[0592] As shown in FIG. 25, when stimulated with SEB, the anti-CTLA4 monoclonal antibodies and the HER2×CTLA4 bispecific antibody molecules were all able to promote T cells to product IL-2 to different degrees, and their T cell activation ability was related to their structures.

[0593] As shown in FIG. 25 (F), the bispecific antibody molecules of Fab-HCAb symmetric structures had weaker T cell activation ability than the corresponding parent monoclonal antibody. The CTLA4 end had weakened activity in the Fab-HCAb structure as compared to its presence in normal IgG or HCAb bivalent structures, so that its dose-related toxicity could be reduced for suitable use in current combination drug doses in the clinic.

[0594] As shown in FIG. 25 (A, D, G, I), the bispecific antibody molecules of IgG-VH tetravalent symmetric structures had slightly different T cell activation ability according to their specific molecular structures. The bispecific antibody molecules of such structures were further classified into three classes according to the position of the VH end of anti-CTLA4 relative to anti-HER2 IgG in the bispecific antibody structure: VH at the C-terminus of the heavy chain of IgG (PR000539 and PR000715); VH at the N-terminus of the heavy chain of IgG (PR001583 and PR001586); and VH at the N-terminus of the light chain of IgG (PR001584 and PR001974). When VH was at the C-terminus of the heavy chain of IgG, the bispecific antibody molecule had significantly weakened T cell activation ability than the corresponding parent monoclonal antibody. When VH was at the N-terminus of either the heavy or light chain of IgG, the bispecific antibody molecule had similar or even slightly enhanced T cell activation ability as compared to the corresponding parent monoclonal antibody. This indicates that the activity of anti-CTLA4 at the VH end can be modulated by adjusting the relative position of VH on IgG to be suitable for different scenarios of combination drug doses in the clinic.

[0595] As shown in FIG. 25 (C), the bispecific antibody molecules of IgG-VH-VH hexavalent symmetric structures had similar T cell activation ability to the parent monoclonal antibody, and the activity of their CTLA4 ends can be modulated by using different linker peptides.

[0596] As shown in FIG. 25 (B, E), the bispecific antibody molecules of 2×VH-IgG hexavalent symmetric structures had similar T cell activation ability to the parent monoclonal antibody, indicating that the CTLA4 ends of those bispecific antibody molecules almost completely retain the activity.

[0597] As shown in FIG. 25 (H), the bispecific antibody molecule of a Fab-Fc-VH(2) asymmetric structure contained two CTLA4-binding domains formed in tandem, and its T cell activation ability was weakened as compared to that of the corresponding parent monoclonal antibody. The CTLA4 end may have reduced dose-related toxicity for suitable use in current combination drug doses in the clinic.

### Example 4.8. Inhibition on Proliferation of HER2⁺ Cells

[0598] This example is intended to investigate the inhibition of the HER2×CTLA4 bispecific antibody molecules on the proliferation of the tumor cell line SK-BR-3 (ATCC, HTB-30) highly expressing human HER2. Specifically, SK-BR-3 cells were digested and resuspended in a DMEM complete medium. The cells were seeded in a 96-well plate (Perkin Elmer, #6005225) at 2000 cells/50 μL, and incubated in an incubator at 37° C. with 5% CO₂ overnight. The next day, the antibody molecules at a total of 6 concentrations obtained by a 5-fold gradient dilution with the highest final concentration of 100 nM were added at 50 μL/well. The mixture was mixed well. hIgG1 iso (CrownBio, #C0001) was used as an isotype control. The cells were incubated in an incubator at 37° C. with 5% CO₂ for 7 days. Thereafter, 100 μL of CellTiter-Glo (Promega, #G7573) was added to each well, and the mixture was mixed on a horizontal shaker for 10 min to induce cell lysis. Finally, chemiluminescence values were measured using an Enspire™ multifunctional microplate reader (Perkin Elmer, Inc.). The data were processed and analyzed by plotting using GraphPad Prism 8 software, and inhibition rates and other parameters were obtained through four-parameter nonlinear fitting.

[0599] In this example, the anti-HER2 monoclonal antibody PR000210 (trastuzumab analog) was used as a positive control molecule, and was also the parent monoclonal antibody of the HER2×CTLA4 bispecific antibody molecule. The results are shown in FIG. 23 and Table 4-19.

[0600] As shown in FIG. 23 (A), the bispecific antibody molecule of a Fab-HCAb symmetric structure (PR000655) had significantly reduced inhibition ability to the proliferation of SK-BR-3 cells as compared to the parent monoclonal antibody PR000210.

[0601] As shown in FIG. 23 (B-C), the bispecific antibody molecules of IgG-VH tetravalent symmetric structures had slightly different inhibitory effects on SK-BR-3 cell proliferation according to their specific molecular structures. The bispecific antibody molecules of such structures were further classified into three classes according to the position of the VH end of anti-CTLA4 relative to anti-HER2 IgG in the bispecific antibody structure: VH at the C-terminus of the heavy chain of IgG (PR000539, PR000540, PR000714, and PR000715); VH at the N-terminus of the heavy chain of IgG (PR001583 and PR001586); and VH at the N-terminus of the light chain of IgG (PR001584). When VH was at the C-terminus of the heavy chain of IgG, the structure well retained the inhibition ability to the proliferation of SK-BR-3 cells, which was reflected in similar or slightly superior IC₅₀ and maximum inhibition rate to those of the parent monoclonal antibody, indicating that the VH end has no significant effect on the Fab end of IgG. When VH was at the N-terminus of either the heavy or light chain of IgG, the bispecific antibody molecules had slightly reduced inhibition ability to the proliferation of SK-BR-3 cells as compared to the parent monoclonal antibody, which was reflected in the IC₅₀ values that were poorer by 3-4 times, but still the same maximum inhibition rate.

[0602] As shown in FIG. 23 (D-E), most of the bispecific antibody molecules of IgG-VH-VH hexavalent symmetric structures had similar inhibition ability to the proliferation of SK-BR-3 cells to the parental monoclonal antibody, except for PR000542 which showed a reduced level of maximum inhibition rate. This result is consistent with the previous results regarding the binding ability to HER2.

[0603] As shown in FIG. 23 (F), the bispecific antibody molecules of 2×VH-IgG hexavalent symmetric structures had significantly reduced inhibition ability to the proliferation of SK-BR-3 cells as compared to the parent monoclonal antibody. This result is consistent with the previous results regarding the binding ability to HER2.

TABLE 4-19
Inhibition on proliferation of SK-BR-3

| | | Maximum | | | Maximum |
|---|---|---|---|---|---|
| | | inhibition | | | inhibition |
| Antibody | IC₅₀ (nM) | rate (%) | Antibody | IC₅₀ (nM) | rate (%) |
| PR000655 | 0.4428 | 28.07 | PR000210 | 0.19 | 59.39 |
| PR000210 | 0.7036 | 36.09 | PR001583 | 0.5974 | 59.68 |
| PR000539 | 0.5134 | 35.58 | PR001584 | 0.7672 | 61.11 |
| PR000540 | 0.6929 | 39.15 | PR001586 | 0.5712 | 59.35 |
| PR000714 | 0.8239 | 37.95 | PR001579 | 0.2543 | 58.32 |
| PR000715 | 0.2101 | 40.05 | PR001580 | 0.3418 | 57.62 |
| PR000542 | 0.6676 | 27.54 | PR001581 | 0.3581 | 58.55 |
| | | | PR001582 | 0.4055 | 60.02 |
| | | | PR001585 | 1.357 | 52.59 |
| | | | PR001587 | 1.732 | 60.67 |

| | |
|---|---|
| Experiment 1 | Experiment 2 |

### Example 4.9. ADCC Effect Mediated by HER2

[0604] This example is intended to investigate the antibody-dependent cell-mediated cytotoxicity (ADCC) of HER2×CTLA4 bispecific antibody molecules to the tumor cell line BT-474 (ATCC, HTB-20) highly expressing human HER2. In the first step, target cells were labeled with DELFIA BATDA (Perkin Elmer, #C136-100). The specific labeling method was as follows. 1×10⁶ target cells were labeled with 2 μL of DELFIA BATDA reagent; the cells were incubated in an incubator at 37° C. with CO₂ for 20 min, washed 4 times with PBS, and centrifuged at 1000 rpm for 5 min; after the last wash, the precipitate was resuspended in an RPMI-1640 medium containing 20% FBS (Thermo, #A 10491), with the cell density adjusted to 1×10⁵/mL. In the second step, the labeled target cells were seeded in a 96-well plate (Corning, #3599) at 100 μL/well. Then, the antibody molecules at a total of 10 concentrations obtained by a 5-fold gradient dilution with the highest final concentration of 100 nM were added at 50 μL/well. The mixture was mixed well. hIgG1 iso (CrownBio, #C0001) was used as an isotype control. The cells were incubated in an incubator at 37° C. with 5% CO₂ for 10 min. In the third step, the NK-92 MI/CD16a cells (ChemPartner) were collected as effector cells, and the cell density of NK-92 MI/CD16a was adjusted to 1.2×10⁶/mL. Then, the cells were added to the 96-well plate at 50 μL/well in an effect-to-target ratio of 6:1. Thereafter, the cells were incubated in an incubator at 37° C. with 5% CO₂ for 4 h. In the fourth step, the cells were centrifuged at 500 g for 5 min, and then 25 μL of supernatant from each well was added to a new 96-well assay plate. Then, a DELFIA® Europium solution (Perkin Elmer, #C135-100) was added at 200 μL/well, and the plate was shaken at 250 rpm at room temperature for 15 min Finally, fluorescence values were measured using an EnVision® 2015 multifunctional microplate reader (Perkin Elmer, Inc.).

[0605] The killing rate was calculated according to the following formula:

Kill rate (%)=(ER−ETSR)/(TMR−ETSR)×100%

[0606] wherein:
[0607] ER=experimental well (antibody+ effector cell+target cell); ETSR=spontaneous release well for mixed effector cell and target cell (effector cell+target cell); TMR=maximum release well for target cell (target cell+lysis buffer)

[0608] The data were processed and analyzed by plotting using GraphPad Prism 8 software, and killing rate curves of the antibodies to target cells, EC₅₀ values, maximum killing rates and other parameters were obtained through four-parameter nonlinear fitting.

[0609] In this example, the anti-HER2 monoclonal antibody PR000210 (trastuzumab analog) was used as a positive control molecule, and was also the parent monoclonal antibody of the HER2×CTLA4 bispecific antibody molecule.

[0610] As shown in FIG. 22 and Table 4-20, the bispecific antibody molecule of an IgG-VH-VH hexavalent symmetric structure (PR001582) and the bispecific antibody molecule of an IgG-VH tetravalent symmetric structure (PR001586) were both able to cause a strong ADCC effect.

TABLE 4-20
Killing target cell BT-474 by ADCC effect

| | | Maximum killing |
|---|---|---|
| Antibody | EC₅₀ (nM) | rate (%) |
| PR000210 | 0.183 | 41.95 |
| PR001582 | 0.055 | 94.65 |
| PR001586 | 0.053 | 94.66 |

### Example 4.10. Determination of the Binding Ability of Bispecific Antibody Molecules to Two Cells Simultaneously by Flow Cytometry

[0611] This example is intended to investigate the binding ability of the HER2×CTLA4 bispecific antibody molecule to SK-BR-3 cells (ATCC, HTB-30) expressing human HER2 and CHO-K1/hCTLA4 cells (ChemPartner) expressing human CTLA4 simultaneously. In the first step, CHO-K1/hCTLA4 cells and SK-BR-3 cells were fluorescently labeled with CFSE (Thermo, #C34554) and Far red (Thermo, #C34564) dyes, respectively. The specific procedures were as follows. CHO-K1/hCTLA4 cells and SK-BR-3 cells were separately resuspended in PBS and adjusted to 2×10⁶/mL. 5 μM CFSE and 1 μM Far red were added to CHO-K1/hCTLA4 cells and SK-BR-3 cells, respectively. The cells were incubated at 37° C. for 10 min with occasional shaking. 5-fold amount of a complete medium was added to stop staining. Thereafter, the mixture was centrifuged at 4° C. for 5 min, and the supernatant was discarded, followed by washing twice with PBS. The densities of the labeled CHO-K1/hCTLA4 cells and SK-BR-3 cells were adjusted to 4×10⁶/mL and 2×10⁶/mL, respectively. In the second step, 25 μL each of the labeled CHO-K1/hCTLA4 cells and SK-BR-3 cells were taken, and mixed well with 50 μL of antibody molecules at a total of 6 concentrations obtained by a four-fold gradient dilution with the highest final concentration of 31.25 nM. The mixture was added to a 96-well plate. hIgG1 iso (CrownBio, #C0001) was used as an isotype control. The plate was incubated at 4° C. for 1 h away from light. Thereafter, 100 μL of 4% paraformaldehyde (PFA) was added to each well to fix the cells for 10 min. Finally, fluorescence signal values were read using a BD FACS CANTOII flow cytometer, and the data were processed and analyzed using FlowJo v10 (FlowJo, LLC) software. The cell numbers in different quadrants were counted according to different fluorescent labels, respectively: Q1 is Far-red labeled SK-BR-3 cells (SK-BR-3⁺); Q3 is CFSE-labeled CHO-K1/hCTLA4 cells (CTLA4⁺); Q2 contains two labeled cell populations (CTLA4⁺& SK-BR-3⁺) formed by the simultaneous binding of bispecific antibody molecules to two cells. The percentage of the double-labeled positive cell population (Q2) relative to all labeled SK-BR-3 cells (Q1⁺ Q2) was calculated according to the following equation, which reflected the binding ability of the bispecific antibody molecules to two cells simultaneously.

Cell ratio of Q2:(Q2/(Q1+Q2))×100%

[0612] The data were processed and analyzed by plotting using GraphPad Prism 8 software, and curves of the antibodies simultaneously binding to two target cells were obtained through four-parameter nonlinear fitting.

[0613] In this example, the anti-HER2 monoclonal antibody PR000210 (trastuzumab analog) and the anti-CTLA4 monoclonal antibody PR000184 were used as control molecules, and were also parent monoclonal antibodies of the HER2×CTLA4 bispecific antibody molecule.

[0614] The panels A, B and C of FIG. 24 separately showed the ability of the bispecific antibodies of IgG-VH tetravalent symmetric structures (PR000539, PR000540, and PR000715), the bispecific antibodies of IgG-VH-VH hexavalent symmetric structures (PR000541 and PR000542), and the bispecific antibody of a Fab-Fc-VH asymmetric structure (PR000916) to simultaneously bind to CHOK1/CTLA4 and SK-BR-3 cells; wherein PR000210, PR000184 and hIgG1 iso were used as controls. The control molecules HER2 monoclonal antibody PR000210 and CTLA4 monoclonal antibody PR000184 were both unable to simultaneously bind to the two cells. The HER2×CTLA4 bispecific antibody molecules were able to simultaneously bind to two cells expressing different targets in a symmetric or asymmetric structure.

### Example 4.11. Pharmacokinetic Study

[0615] In this example, the pharmacokinetic properties of antibody molecules in mice were investigated. The following antibodies were tested in this example: an anti-HER2 monoclonal antibody, PR000210 (trastuzumab analog); an HER2×CTLA4 bispecific antibody molecule of an IgG-VH tetravalent symmetric structure, PR000540; and an HER2×CTLA4 bispecific antibody molecule of an IgG-VH-VH hexavalent symmetric structure, PR000541.

[0616] The test was performed as follows: for each test antibody molecule, 3 female C57BL/6 mice weighing 18-22 g were selected and administered by intravenous injection at a dose of 5 mg/kg. The whole blood was collected before the administration and 0.5 h, 24 h (1 day), 2 days, 4 days, 7 days, 10 days and 14 days after the administration, left to stand for 30 min for coagulation, and centrifuged at 12,000 g at 4° C. for 5 min, and the isolated serum sample was cryopreserved at −80° C. until it was taken for analysis.

[0617] In this example, the drug concentration in the serum of mice was quantitatively determined by an Fc end ELISA method. The method was performed by capturing a fusion protein containing human Fc in the serum of mice using a goat anti-human Fc polyclonal antibody coating a 96-well plate, and then adding an HRP-labeled goat anti-human Fc secondary antibody. The plasma concentration data were analyzed using a non-compartmental analysis (NCA) model of Phoenix WinNonlin software (version 6.4) to evaluate the pharmacokinetics.

[0618] As shown in FIG. 26 and Table 4-21, the bispecific antibody PR000540 and the parent monoclonal antibody PR000210 had similar clearance rates, and PR000540 had a longer half-life t_{1/2} value (more than 20 days). PR000541 showed a faster clearance rate, probably due to its complex structure.

TABLE 4-21
Pharmacokinetics in mice

| | | CL | Vss | *Terminal | AUClast | AUCINF |
|---|---|---|---|---|---|---|
| Structure | Antibody | (mL/day/kg) | (mL/kg) | t½ (day) | (day*ug/mL) | (day*ug/mL) |
| IgG | PR000210 | 4.99 ± 0.93 | 96.2 ± 4.2 | 14.0 ± 1.9 | 470 ± 38 | 926 ± 177 |
| IgG_HC-VH | PR000540 | 4.85 ± 0.59 | 142 ± 18 | 23.1 ± 3.2 | 374 ± 37 | 884 ± 109 |
| IgG_HC-VH- | PR000541 | 14.3 ± 1.41 | 152 ± 5.86 | 7.58 ± 0.58 | 251 ± 15.7 | 353 ± 33.4 |
| VH | | | | | | |

### Example 4.12. Summary

[0619] In this example, HER2×CTLA4 bispecific antibody molecules of a variety of structures are constructed using the antigen-binding domain Fab of the anti-HER2 IgG antibody and the antigen-binding domain VH of the anti-CTLA4 HCAb antibody. This shows the flexibility of constructing a bispecific antibody molecular structure based on HCAb. By regulating the functional activity of HER2 and CTLA4 ends through different structure types, relative positions, binding valence and other parameters, different activity combinations are designed to meet the requirements of different mechanisms of action. Currently, the recommended initial dose of the anti-HER2 monoclonal antibody trastuzumab is 4 mg/kg for the treatment of breast cancer and 8 mg/kg for the treatment of gastric cancer. It is slightly higher than the recommended dose of 3 mg/kg of the anti-CTLA4 monoclonal antibody Ipilimumab for the treatment of melanoma.

[0620] For example, when VH of anti-CTLA4 is at the N-terminus of anti-PD-L1 IgG, both the HER2 and CTLA4 ends of the bispecific antibody molecules (e.g., PR001583 and PR001584) can almost completely retain comparable activity to their parent monoclonal antibodies, and show similar ability to the corresponding parent monoclonal antibody in in vitro functional experiments such as a tumor cell proliferation inhibition experiment and a superantigen stimulation experiment. Therefore, this structure can be used to achieve a 1:1 dose combination of combination drugs.

[0621] For another example, both the HER2 and CTLA4 ends of bispecific antibody molecules of IgG-VH-VH hexavalent symmetric structures (e.g., PR001579, PR001580, and PR001581) can also almost completely retain comparable activity to their parent monoclonal antibodies. Therefore, this structure can be used to achieve a 1:1 dose combination of combination drugs.

[0622] For another example, when VH of anti-CTLA4 is at the C terminus of anti-HER2 IgG or in the Fab-HCAb structure, the activity of the HER2 ends of the bispecific antibody molecules (e.g., PR000539, PR000540, and PR000655) is almost comparable to their parent monoclonal antibodies, but the activity of the CTLA4 ends is weakened to different degrees. Therefore, this structure can be used to achieve the requirements for moderate or low doses of CTLA4 inhibitors in the clinic.

[0623] For another example, in the Fab-Fc-VH(2) asymmetric structure, the HER2-binding domain of the bispecific antibody molecule is a monovalent Fab structure, but its binding ability to HER2 is very close to that of the bivalent parent monoclonal antibody. This structure contains two CTLA4-binding domains formed in tandem, with similar binding ability to CTLA4 as the parent monoclonal antibody, but with reduced T cell activation ability as compared to the parent monoclonal antibody. Therefore, this structure can bring tumor target cells and T cells together to promote the formation of immune synapses, and can be used to achieve the requirements for moderate or low doses of CTLA4 inhibitors in the clinic, while also increasing the ability to specifically target tumors.

### Example 5. PD-L1×4-1BB Bispecific Antibodies

### Example 5.1. Background

[0624] Programmed death receptor 1 (PD-1) is mainly expressed in immune cells such as T cells. It has two ligands, i.e., programmed death ligand 1 (PD-L1) and PD-L2. PD-L1 is mainly expressed in antigen-presenting cells and a variety of tumor cells. The interaction between PD-L1 and PD-1 can down-regulate the activity of T cells, weaken the secretion of cytokines and play a role in immunosuppression. The expression of the PD-L1 protein can be detected in many human tumor tissues. The microenvironment at the tumor site can induce the expression of PD-L1 on tumor cells, and the expressed PD-L1 facilitates the occurrence and growth of tumors, induces the apoptosis of anti-tumor T cells and further protects the tumor cells from immune attack.

[0625] 4-1BB (TNFRSF9, CD137) is a transmembrane protein belonging to the TNF receptor superfamily 4-1BB is a co-stimulatory molecule expressed on a variety of immune cells. It is a multifunctional modulator of immune activity. Its expression is induced in activated T cells, NK cells and other immune cells. 4-1BB activates T cells through trimerization mediated by its ligand 4-1BBL, promoting cell proliferation and cytokine release. Anti-4-1BB agonistic antibodies have the function of inhibiting tumors. The first 4-1BB antibodies to be subjected to clinical trials were Utomilumab from Pfizer and Urelumab (BMS-663513) from Bristol-Myers Squibb. The initial clinical results of urelumab were published in 2008. Although encouraging efficacy was observed in some patients, the data showed Urelumab to cause target and dose-associated hepatotoxicity. Moreover, two patients in the clinical trial died from hepatotoxicity, resulting in the discontinuation of related clinical trials. Utomilumab has better safety enabling the dose to be increased to 10 mg/kg, but still has a poor therapeutic effect.

[0626] In this example, we constructed bispecific antibodies targeting both PD-L1 and 4-1BB to improve anti-tumor efficacy and safety through one or more mechanisms of action. Firstly, the PD-L1×4-1BB bispecific antibody can activate T cells by blocking the PD-1/PD-L1 signaling pathway. Secondly, the PD-L1 molecules highly expressed on the tumor cell surfaces can use the bispecific antibody molecules to promote the crosslinking and trimerization of the 4-1BB molecules on the T cell surfaces and activate the downstream signaling pathway, thereby promoting T cell activation and proliferation. Thirdly, the bispecific antibody molecule-mediated T cell activation is limited to the tumor microenvironment, so that the toxic and side effects caused by over-activation of T cells in normal tissues by monoclonal antibodies similar to Urelumab can be avoided.

### Example 5.2. Acquisition of Anti-PD-L1 IgG Antibodies and Anti-4-1BB H2L2 or HCAb Antibodies

### Example 5.2.1. Acquisition of Fully Human Anti-PD-L1 IgG Antibodies

[0627] The fully human anti-PD-L1 IgG antibody PR000265 (Table 5-8) used in this example was derived from Harbour H2L2 mice and was found as described in Example 3.2.1.

### Example 5.2.2. Acquisition of Fully Human Anti-4-1BB H2L2 Antibodies

[0628] The Harbour H2L2 mouse (Harbour Antibodies BV) is a transgenic mouse carrying an immune repertoire of human immunoglobulins that produces antibodies with intact human antibody variable domains and rat constant domains.

[0629] Harbour H2L2 mice were subjected to multiple rounds of immunization with a soluble recombinant human 4-1BB-Fc fusion protein (GenScript Biotech). When the titer of the 4-1BB-specific antibody in the serum of mice was detected to reach a certain level, spleen cells of the mice were taken and fused with a myeloma cell line to obtain hybridoma cells. After multiple rounds of screening and cloning of the hybridoma cells, several monoclonal antibody molecules specifically recognizing 4-1BB were identified. The monoclonal antibodies were further identified, and several candidate antibody molecules were preferentially selected according to parameters such as the binding ability to human 4-1BB, the binding ability to cynomolgus monkey 4-1BB, and the T cell activation ability. The candidate antibody molecules were then subjected to sequence analysis and optimization to obtain several variant sequences. The VL and VH sequences of the antibody were fused to the corresponding human κ light chain constant region and IgG1 heavy chain constant region sequences and expressed to obtain recombinant fully human antibody molecules. The recombinant fully human anti-4-1BB IgG antibodies PR000197 and PR000448 are listed in Table 5-8.

[0630] The binding ability of the 4-1BB antibodies PR000197 and PR000448 to a CHO-K1 cell line CHO-K1/hu 4-1BB (GenScript Biotech, M00538) highly expressing human 4-1BB was tested by flow cytometry FACS and the method described in Example 5.6. As shown in FIG. 28 (A-B), the anti-4-1BB antibodies had similar binding ability to Utomilumab.

### Example 5.2.3. Acquisition of Fully Human Anti-4-1BB HCAb Antibodies

[0631] The Harbour HCAb mouse (Harbour Antibodies BV, WO2010/109165A2) is a transgenic mouse carrying an immune repertoire of human immunoglobulins, capable of producing heavy chain-only antibodies that are only half the size of conventional IgG antibodies. The antibodies produced have only human antibody heavy chain variable domains and mouse Fc constant domains.

[0632] Harbour HCAb mice were subjected to multiple rounds of immunization with a soluble recombinant human 4-1BB-Fc fusion protein (ChemPartner) or human 4-1BB-overexpressing NIH-3T3 cells (ChemPartner). When the titer of the 4-1BB-specific antibody in the serum of mice was detected to reach a certain level, spleen cells of the mice were taken, from which B cells were isolated, and the CD138-positive plasma cells were sorted using a mouse plasma cell isolation kit (Miltenyi, #130-092-530). The human VH gene was amplified from plasma cells using conventional molecular biology techniques, and the amplified human VH gene fragments were constructed into mammalian cell expression plasmid pCAG vectors encoding the sequence of the heavy chain Fc region of the human IgG1 antibody. Mammal host cells (e.g., human embryonic kidney cell HEK293) were transfected with the plasmids and allowed to express antibodies to obtain a supernatant with fully human HCAb antibodies. Positive HCAb antibodies were identified by testing the supernatant with HCAb antibodies for binding to CHO-K1 cell CHO-K1/hu4-1BB highly expressing human 4-1BB by FACS. These HCAb antibodies were further identified, and several candidate HCAb antibody molecules were preferentially selected according to parameters such as the binding ability to human 4-1BB, the binding ability to cynomolgus monkey 4-1BB, and the T cell activation ability. The candidate HCAb antibody molecules were then subjected to sequence analysis and optimization to obtain several variant sequences. The VH sequence of the HCAb antibody and the Fc sequence of the heavy chain of human IgG1 were fused and expressed to obtain fully human recombinant HCAb antibody molecules. The recombinant fully human anti-4-1BB HCAb antibodies PR001758, PR001760 and PR001836 are listed in Table 5-8.

[0633] The binding ability of the 4-1BB heavy chain antibodies to CHO-K1/hu 4-1BB cells (GenScript Biotech, M00538) was tested by flow cytometry FACS and the method described in Example 5.6. As shown in FIG. 28 (C-F), the 4-1BB heavy chain antibodies had similar binding ability to utomilumab, and had superior binding ability to Urelumab.

### Example 5.3. Construction of Bispecific Antibody Molecules of FIT-Ig Structure Using Anti-PD-L1 IgG Antibodies and Anti-4-1BB IgG Antibodies

[0634] In this example, anti-PD-L1×4-1BB bispecific antibody molecules of FIT-Ig structures were constructed using the antigen-binding domain Fab of the anti-PD-L1 IgG antibody PR000265 or PR000151 (atezolizumab analog) and the antigen-binding domain Fab of the anti-4-1BB IgG antibody PR000197 or PR000448. The FIT-Ig structures can be designed by referring to WO2015/103072A1, with the structures shown in FIG. 1 (28). The constructed molecules are summarized in Table 5-1. The antibody molecule samples were prepared and analyzed according to the method described in Example 2, with the results summarized in Table 5-2. The sequence numbers corresponding to the polypeptide chains of the bispecific antibody molecules of FIT-Ig structures are listed in Table 5-3.

TABLE 5-1
PD-L1 × 4-1BB bispecific antibody molecules of FIT-Ig structures

| Struc- | Bispecific | PD-L1 | 4-1BB | 4-1BB | Linker | Fc type |
|---|---|---|---|---|---|---|
| ture | antibody | antibody | antibody | Fab | pep- | (mu- |
| No. | molecules | (Fab A) | (Fab B) | position | tide | tation) |
| FIT-Ig | PR000701 | PR000265 | PR000197 | Close | None | Human |
| | | | | to Fc | | IgG4 |
| FIT-Ig | PR003052 | PR000151 | PR000448 | Close | None | Human |
| | | | | to Fc | | IgG4 |

TABLE 5-2
Expression of PD-L1 × 4-1BB bispecific
antibody molecule proteins of FIT-Ig structures

| | Bispecific | | Yield (mg/L) | |
|---|---|---|---|---|
| Structure | antibody | Expression system | after first | SEC-HPLC |
| No. | molecules | and volume | purification | purity (%) |
| FIT-Ig | PR000701 | HEK293-F (30 ml) | 198.0 | 79.88 |
| FIT-Ig | PR003052 | HEK293-6E (40 ml) | 47.5 | 87.76 |

TABLE 5-3
Sequence numbers of PD-L1 × 4-1BB bispecific
antibody molecules of FIT-Ig structures

| Antibody | Polypeptide | Polypeptide | Polypeptide |
|---|---|---|---|
| No. | chain 1 | chain 2 | chain 3 |
| PR000701 | 384 | 371 | 355 |
| PR003052 | 452 | 451 | 355 |

### Example 5.4. Construction of Bispecific Antibody Molecules Using Anti-PD-L1 IgG Antibodies and Anti-4-1BB HCAb Antibodies

[0635] In this example, PD-L1×4-1BB bispecific antibody molecules of a variety of structures were constructed using the antigen-binding domain Fab of the anti-PD-L1 IgG antibody PR000265 and the antigen-binding domain VH of the anti-4-1BB HCAb antibody PR001758, PR001760, or PR001836.

[0636] In this and subsequent examples, the anti-PD-L1 IgG monoclonal antibody PR000265 was used as a positive control molecule, and was also the parent monoclonal antibody of the PD-L1 end of the PD-L1×4-1BB bispecific antibody molecules. The anti-4-1BB IgG monoclonal antibody Urelumab (IgG4) or Utomilumab (IgG2) was used as a positive control molecule. The PD-L1×4-1BB bispecific antibody molecule PR001289 was used as a positive control molecule, the sequences of which are derived from the sequences of the 4-1BB×PD-L1 single-domain antibody disclosed in the patent WO2017/123650A2.

### Example 5.4.1. Construction of Molecules of Fab-HCAb Symmetric Structures

[0637] PD-L1×4-1BB bispecific antibody molecules of Fab-HCAb symmetric structures were designed according to the structures described in Example 1.1 using anti-PD-L1 IgG antibodies and anti-4-1BB heavy chain antibodies, with the results summarized in Table 5-4. The antibody molecule samples were prepared and analyzed according to the method described in Example 2, with the results summarized in Table 5-5.

TABLE 5-4
PD-L1 × 4-1BB bispecific antibody molecules
of Fab-HCAb symmetric structures

| | | | | First | Second | |
|---|---|---|---|---|---|---|
| | | | | linker | linker | |
| | | | | peptide | peptide | |
| | | | | (between | (between | |
| Struc- | Bispecific | PD-L1 | 4-1BB | Fab | VH_B | Fc type |
| ture | antibody | antibody | antibody | and | and | mut- |
| No. | molecules | (Fab) | (VH_B) | VH_B) | CH2) | (ation) |
| 1 | PR004270 | PR000265 | PR001760 | H1_15 | Human | Human |
| | | | | | IgG1 | IgG1 |
| | | | | | hinge | (L234A, |
| | | | | | (C220S) | L235A) |
| 2 | PR007163 | PR000265 | PR001760 | None | Human | Human |
| | | | | | IgG1 | IgG1 |
| | | | | | hinge | (L234A, |
| | | | | | (C220S) | L235A) |
| 1 | PR007164 | PR000265 | PR001760 | None | Human | Human |
| | | | | | IgG1 | IgG1 |
| | | | | | hinge | (L234A, |
| | | | | | (C220S) | L235A) |

TABLE 5-5
Expression of PD-L1 × 4-1BB bispecific antibody
molecule proteins of Fab-HCAb symmetric structures

| | | | Plasmid | | |
|---|---|---|---|---|---|
| | Bispecific | | transfection ratio | Yield (mg/L) | |
| Structure | antibody | Expression system | (short chain:long | after first | SEC-HPLC |
| No. | molecules | and volume | chain) | purification | purity (%) |
| 1 | PR004270 | HEK293-6E (40 ml) | 3:2 | 77.50 | 92.33 |
| 2 | PR007163 | HEK293 (100 ml) | 3:1 | 13 | 97.84 |
| 1 | PR007164 | HEK293 (100 ml) | 3:1 | 47 | 93.37 |

### Example 5.4.2. Construction of Molecules of IgG-VH Tetravalent Symmetric Structure

[0638] PD-L1×4-1BB bispecific antibody molecules of IgG-VH tetravalent symmetric structures were designed according to the structures described in Example 1.2 using anti-PD-L1 IgG antibodies and anti-4-1BB heavy chain antibodies, with the results summarized in Table 5-6. The antibody molecule samples were prepared and analyzed according to the method described in Example 2, with the results summarized in Table 5-7.

TABLE 5-6
PD-L1 × 4-1BB bispecific antibody molecules of IgG-
VH tetravalent symmetric structures

| | | | | VH_B | | |
|---|---|---|---|---|---|---|
| | | | | position | | |
| Struc- | Bispecific | PD-L1 | 4-1BB | relative | | |
| ture | antibody | antibody | antibody | to | Linker | Fc type |
| No. | molecules | (IgG) | (VH_B) | IgG | peptide | (mutation) |
| 5 | PR003549 | PR000265 | PR001758 | C- | H1_ | Human |
| | | | | terminus | 15-RT | IgG1 |
| | | | | of heavy | | (L234A, |
| | | | | chain | | L235A, |
| | | | | | | P329G) |
| 5 | PR003550 | PR000265 | PR001760 | C- | H1_ | Human |
| | | | | terminus | 15-RT | IgG1 |
| | | | | of heavy | | (L234A, |
| | | | | chain | | L235A, |
| | | | | | | P329G) |
| 5 | PR003551 | PR000265 | PR001836 | C- | H1_ | Human |
| | | | | terminus | 15-RT | IgG1 |
| | | | | of heavy | | (L234A, |
| | | | | chain | | L235A, |
| | | | | | | P329G) |

TABLE 5-7
Expression of PD-L1 × 4-1BB bispecific antibody molecule
proteins of IgG-VH tetravalent symmetric structures

| | Bispecific | | Yield (mg/L) | |
|---|---|---|---|---|
| Structure | antibody | Expression system | after first | SEC-HPLC |
| No. | molecules | and volume | purification | purity (%) |
| 5 | PR003549 | HEK293-F (30 ml) | 24.51 | 98.31 |
| 5 | PR003550 | HEK293-F (30 ml) | 42.16 | 95.41 |
| 5 | PR003551 | HEK293-F (30 ml) | 2.28 | 99.39 |

### Example 5.4.3. Sequences of PD-L1×4-1BB Bispecific Antibody Molecules and Control Molecules

[0639] The sequence numbers corresponding to the sequences of the PD-L1×4-1BB bispecific antibody molecules constructed in this example, the corresponding parent monoclonal antibody molecules such as the PD-L1 monoclonal antibody and the 4-1BB monoclonal antibody, and the control molecules are listed in Table 5-8, Table 5-9 and Table 5-10. The structure numbers in Table 5-10 correspond to those in Table 1-1 and FIG. 1. The sequence numbers of the corresponding CDR sequences of the first and second antigen-binding domains of the bispecific antibody molecules are listed in Table 5-11.

TABLE 5-8
Control molecules and parent monoclonal antibodies

| Antibody | |
|---|---|
| No. | Antibody |
| PR000265 | Anti-PD-L1 91G3H5H3 (D54E), hIgG1 (N297A) |
| PR000151 | Anti-PD-L1 monoclonal antibody atezolizumab analog, hIgG1 |
| | (N297A) |
| PR000448 | Anti-4-1BB 79B10G8D4 (H: N52Q; L: F2I), hIgG4 (S228P) |
| PR000197 | Anti-4-1BB 79B10G8D4, hIgG4 (S228P) |
| PR001758 | Anti-4-1BB heavy-chain antibody 1016P0010B11, hIgG1 |
| PR001760 | Anti-4-1BB heavy-chain antibody 1016P0011G10, hIgG1 |
| PR001836 | Anti-4-1BB heavy-chain antibody 1016P0020G4, hIgG1 |
| PR000628 | Anti-4-1BB monoclonal antibody urelumab analog, hIgG4 |
| | (S228P) |
| PR000483 | Anti-4-1BB monoclonal antibody utomilumab analog, hIgG2 |
| PR001289 | PD-L1 × 4-1BB bispecific antibody molecule, with only one |
| | different polypeptide chain, the sequences of which are |
| | derived from the sequence of the 4-1BB × PD-L1 single- |
| | domain antibody disclosed in the patent WO2017/123650A2, |
| | hIgG1(LALA) |

TABLE 5-8
Control molecules and parent monoclonal antibodies

| Antibody | Light | Heavy | | | | | | | | |
|---|---|---|---|---|---|---|---|---|---|---|
| No. | chain | chain | VL | VH | LCDR1 | LCDR2 | LCDR3 | HCDR1 | HCDR2 | HCDR3 |
| PR000265 | 353 | 308 | 282 | 240 | 167 | 188 | 211 | 15 | 69 | 122 |
| PR000151 | 349 | 302 | 284 | 235 | 169 | 190 | 213 | 16 | 64 | 124 |
| PR000197 | 350 | 304 | 285 | 237 | 170 | 191 | 214 | 18 | 66 | 126 |
| PR000448 | 355 | 311 | 289 | 242 | 170 | 191 | 214 | 18 | 71 | 126 |
| PR001758 | None | 320 | None | 252 | None | None | None | 27 | 79 | 137 |
| PR001760 | None | 321 | None | 253 | None | None | None | 28 | 80 | 138 |
| PR001836 | None | 323 | None | 255 | None | None | None | 29 | 82 | 138 |
| PR000628 | 358 | 314 | 292 | 246 | 175 | 195 | 219 | 18 | 73 | 131 |
| PR000483 | 356 | 312 | 290 | 243 | 174 | 194 | 218 | 22 | 72 | 130 |
| PR001289 | None | 494 | None | None | None | None | None | None | None | None |

TABLE 5-10
Sequence numbers of PD-L1 × 4-1BB
bispecific antibody molecules of this example

| Structure | Antibody | Polypeptide chain 1 | Polypeptide chain 2 |
|---|---|---|---|
| No. | No. | (short chain) | (long chain) |
| 5 | PR003549 | 353 | 460 |
| 5 | PR003550 | 353 | 461 |
| 5 | PR003551 | 353 | 462 |
| 1 | PR004270 | 371 | 486 |
| 2 | PR007163 | 353 | 521 |
| 1 | PR007164 | 371 | 522 |

TABLE 5-11
Sequence numbers of CDRs of antigen-binding domains of
PD-L1 × 4-1BB bispecific antibody molecules

| | | Antigen | | | | | | |
|---|---|---|---|---|---|---|---|---|
| | | binding | | | | | | |
| Structure | Antibody | domain | | | | | | |
| No. | No. | No. | LCDR1 | LCDR2 | LCDR3 | HCDR1 | HCDR2 | HCDR3 |
| 1 | PR004270, | #1 | 167 | 188 | 211 | 15 | 69 | 122 |
| | PR007164 | #2 | None | None | None | 28 | 80 | 138 |
| 2 | PR007163 | #1 | 167 | 188 | 211 | 15 | 69 | 122 |
| | | #2 | None | None | None | 28 | 80 | 138 |
| 5 | PR003549 | #1 | 167 | 188 | 211 | 15 | 69 | 122 |
| | | #2 | None | None | None | 27 | 79 | 137 |
| 5 | PR003550 | #1 | 167 | 188 | 211 | 15 | 69 | 122 |
| | | #2 | None | None | None | 28 | 80 | 138 |
| 5 | PR003551 | #1 | 167 | 188 | 211 | 15 | 69 | 122 |
| | | #2 | None | None | None | 29 | 82 | 138 |
| FIT- | PR000701 | #1 | 167 | 188 | 211 | 15 | 69 | 122 |
| Ig | | #2 | 170 | 191 | 214 | 18 | 66 | 126 |
| FIT- | PR003052 | #1 | 169 | 190 | 213 | 16 | 64 | 124 |
| Ig | | #2 | 170 | 191 | 214 | 18 | 71 | 126 |

### Example 5.5. Binding to PD-L1

[0640] This example is intended to investigate the binding activity of the PD-L1×4-1BB bispecific antibody molecules to PD-L1.

### Example 5.5.1. Binding to CHO-K1 Cells CHO-K1/hPDL1 Highly Expressing Human PD-L1

[0641] The binding ability of the antibody molecules to a CHO-K1 cell line CHO-K1/hPDL1 (GenScript Biotech, M00543) highly expressing human PD-L1 was tested by flow cytometry FACS. Specifically, CHO-K1/hPDL1 cells were digested and resuspended in a complete medium, with the cell density adjusted to 1×10⁶ cells/mL. Thereafter, the cells were seeded in a 96-well V-bottom plate (Corning, #3894) at 100 μL/well and centrifuged at 4° C. for 5 min, and the supernatant was discarded. Then, the serially diluted antibody molecules were added to the 96-well plate at 100 μL/well, and the mixtures were well mixed. The antibody molecules might serially diluted 3-fold from the highest final concentration 200 nM to obtain a total of 12 concentrations. hIgG1 iso (CrownBio, #C0001) was used as an isotype control. The cells were incubated at 4° C. for 1 h away from light. Then, the cells in each well were rinsed twice with 100 μL of pre-cooled FACS buffer (PBS buffer containing 0.5% BSA) and centrifuged at 500 g at 4° C. for 5 min, and then the supernatant was discarded. Thereafter, a fluorescent secondary antibody (Goat human IgG (H+L) Alexa Fluor 488 conjugation, Thermo, #A11013, 1:1000 dilution) was added at 100 μL/well, and the plate was incubated at 4° C. for 1 h away from light. Then, the cells in each well were then rinsed twice with 200 μL of pre-cooled FACS buffer and centrifuged at 500 g at 4° C. for 5 min, and then the supernatant was discarded. Finally, a pre-cooled FACS buffer was added at 200 μL/well to resuspend the cells. Fluorescence signal values were read using a BD FACS CANTOII flow cytometer or an ACEA NovoCyte flow cytometer, and the data were processed and analyzed using FlowJo v10 (FlowJo, LLC) software. The data were processed and analyzed by plotting using GraphPad Prism 8 software, and binding curves of the antibodies to target cells, EC₅₀ values and other parameters were obtained through four-parameter nonlinear fitting.

[0642] In this examples, the anti-PD-L1 monoclonal antibody PR000265 was used as a positive control molecule. It was also the parent monoclonal antibody of the PD-L1 end of the PD-L1×4-1BB bispecific antibody molecules. The results are shown in FIG. 27 and Table 5-12.

[0643] As shown in FIG. 27 (A), the bispecific antibody molecules of IgG-VH tetravalent symmetric structures (PR003549, PR003550, and PR003551) had similar binding ability to PD-L1 to the parent monoclonal antibody PR000265, and had slightly superior EC₅₀ values and maximum MFI values for binding to PD-L1 than the bispecific antibody molecules of FIT-Ig structures (PR000701 and PR003052).

[0644] As shown in FIG. 27 (B), the bispecific antibody molecule of a Fab-HCAb symmetric structure (PR004270) had similar binding ability to PD-L1 to the parent monoclonal antibody, and had a slightly weaker EC₅₀ value but a higher maximum MFI value for binding to PD-L1 than the parent monoclonal antibody.

[0645] As shown in FIG. 27 (C), the bispecific antibody molecules of Fab-HCAb symmetric structures, whether the molecule of the structure (1) (PR007164) or the molecule of the structure (2) (PR007163), had almost identical binding activity to PD-L1, indicating that the fusion of the CL of Fab to the heavy chain where VH_B is located does not affect the binding activity of the Fab end.

TABLE 5-12
Binding to CHO-K1/hPDL1

| | EC₅₀ | Maximum | | EC₅₀ | Maximum | | EC₅₀ | Maximum |
|---|---|---|---|---|---|---|---|---|
| Antibody | (nM) | MFI | Antibody | (nM) | MFI | Antibody | (nM) | MFI |
| PR003052 | 1.75 | 2006 | PR004270 | 0.963 | 14716 | PR007163 | 2.258 | 51309 |
| PR000701 | 1.723 | 1714 | PR000265 | 0.356 | 12960 | PR007164 | 1.926 | 51400 |
| PR003549 | 1.558 | 2224 | | | | PR000265 | 1.561 | 47006 |
| PR003550 | 1.111 | 2254 | | | | | | |
| PR003551 | 1.294 | 2149 | | | | | | |
| PR000265 | 0.7807 | 2004 | | | | | | |

| | | |
|---|---|---|
| Experiment 1 | Experiment 2 | Experiment 3 |

### Example 5.6. Binding to 4-1BB

[0646] This example is intended to investigate the binding activity of the PD-L1×4-1BB bispecific antibody molecules to 4-1BB.

[0647] The binding abilities of the antibody molecules to a CHO-K1 cell strain highly expressing human 4-1BB (CHO-K1/hu4-1BB, GenScript, M00538) and a CHO-K1 cell strain highly expressing cynomolgus monkey 4-1BB (CHO-K1/cyno4-1BB, GenScript, M00569) were determined by flow cytometry FACS. Specifically, the cells were digested and resuspended in a complete medium, with the cell density adjusted to 2×10⁶ cells/mL. Then, the cells were seeded in a 96-well V-bottom plate (Corning, #3894) at 100 μL/well (2×10⁵ cells/well) and centrifuged at 4° C. for 5 min, and the supernatant was discarded. Then, the serially diluted antibody molecules were added to the 96-well plate at 100 μL/well, and the mixtures were well mixed. The antibody molecules might serially diluted 3-fold from the highest final concentration 200 nM to obtain a total of 12 concentrations. hIgG1 iso (CrownBio, #C0001) was used as an isotype control. The cells were incubated at 4° C. for 1 h away from light. Then, the cells in each well were rinsed twice with 100 μL of pre-cooled FACS buffer (PBS buffer containing 0.5% BSA) and centrifuged at 500 g at 4° C. for 5 min, and then the supernatant was discarded. Thereafter, a fluorescent secondary antibody (Goat human IgG (H+L) Alexa Fluor 488 conjugation, Thermo, #A11013, 1:1000 dilution) was added at 100 μL/well, and the plate was incubated at 4° C. for 1 h away from light. Then, the cells in each well were then rinsed twice with 200 μL of pre-cooled FACS buffer and centrifuged at 500 g at 4° C. for 5 min, and then the supernatant was discarded. Finally, a pre-cooled FACS buffer was added at 200 μL/well to resuspend the cells. Fluorescence signal values were read using a BD FACS CANTOII flow cytometer or an ACEA NovoCyte flow cytometer, and the data were processed and analyzed using FlowJo v10 (FlowJo, LLC) software. The data were processed and analyzed by plotting using GraphPad Prism 8 software, and binding curves of the antibodies to target cells, EC₅₀ values and other parameters were obtained through four-parameter nonlinear fitting.

[0648] In this example, the anti-4-1BB monoclonal antibody Urelumab or Utomilumab was used as a positive control molecule.

### Example 5.6.1. Binding to CHO-K1 Cells CHO-K1/Hu4-1BB Highly Expressing Human 4-1BB

[0649] The results are shown in FIG. 28 and Table 5-13.

[0650] As shown in FIG. 28 (G), the bispecific antibody molecules of IgG-VH tetravalent symmetric structures (PR003549, PR003550, and PR003551) had superior binding ability to human 4-1BB to the bispecific antibody molecules of FIT-Ig structures (PR000701 and PR003052), and had superior maximum MFI values to the positive control Urelumab.

[0651] As shown in FIG. 28 (H), the bispecific antibody molecule of a Fab-HCAb symmetric structure (PR004270) had a superior binding ability to human 4-1BB in terms of the maximum MFI value to the positive controls Urelumab and Utomilumab.

[0652] As shown in FIG. 28 (I), the bispecific antibody molecules of Fab-HCAb symmetric structures, whether the molecule of the structure (1) (PR007164) or the molecule of the structure (2) (PR007163), had almost identical binding activity to 4-1BB, and were comparable to the parent monoclonal antibody PR001760.

TABLE 5-13
Binding to CHO-K1/hu 4-1BB

| | | Maxi- | | | Maxi- | | | Maxi- |
|---|---|---|---|---|---|---|---|---|
| | EC₅₀ | mum | | EC₅₀ | mum | | EC₅₀ | mum |
| Antibody | (nM) | MFI | Antibody | (nM) | MFI | Antibody | (nM) | MFI |
| PR000197 | 0.673 | 15488 | PR000448 | 0.947 | 8182 | PR001838 | 0.8512 | 101674 |
| Utomilumab | 0.553 | 13223 | Utomilumab | 0.627 | 7747 | PR004469 | 1.295 | 109216 |
| | | | | | | Urelumab | 0.6834 | 61805 |
| | | Maxi- | | | Maxi- | | | |
| | EC₅₀ | mum | | EC₅₀ | mum | | | |
| Antibody | (nM) | MFI | Antibody | (nM) | MFI | | | |
| PR001758 | 0.2122 | 1644 | PR001836 | 0.2798 | 1833 | | | |
| PR001760 | 0.1981 | 1742 | PR001838 | 0.2658 | 1832 | | | |
| PR001771 | 0.5323 | 1716 | PR001840 | 0.4302 | 1789 | | | |
| Urelumab | 0.2223 | 1381 | Urelumab | 0.2197 | 1278 | | | |
| Utomilumab | 0.1297 | 1584 | Utomilumab | 0.1771 | 1643 | | | |
| | | Maxi- | | | Maxi- | | | Maxi- |
| | EC₅₀ | mum | | EC₅₀ | mum | | EC₅₀ | mum |
| Antibody | (nM) | MFI | Antibody | (nM) | MFI | Antibody | (nM) | MFI |
| PR003052 | 36 | 1390 | PR004270 | 1.576 | 46812 | PR007163 | 3.762 | 65156 |
| PR000701 | 10.15 | 1338 | Urelumab | 0.3469 | 21640 | PR007164 | 3.17 | 63217 |
| PR003549 | 1.898 | 1546 | Utomilumab | 0.4635 | 37245 | PR001760 | 3.761 | 83588 |
| PR003550 | 1.523 | 1567 | | | | | | |
| PR003551 | 3.148 | 1570 | | | | | | |
| Urelumab | 1.014 | 570 | | | | | | |

### Example 5.6.2. Binding to CHO-K1 Cell CHO-K1/Cyno 4-1BB Highly Expressing Cynomolgus Monkey 4-1BB

[0653] As shown in FIG. 29 and Table 5-14, the bispecific antibody molecules of this example were able to bind to cynomolgus monkey 4-1BB, whereas Urelumab was unable to bind to cynomolgus monkey 4-1BB. The binding ability of the bispecific antibody molecules to cynomolgus monkey 4-1BB (FIG. 29, A-B) was comparable to their binding ability to human 4-1BB (FIG. 28, G-H), with similar binding EC₅₀.

TABLE 5-14
Binding to CHO-K1/cyno 4-1BB

| | EC₅₀ | Maximum | | EC₅₀ | Maximum |
|---|---|---|---|---|---|
| Antibody | (nM) | MFI | Antibody | (nM) | MFI |
| PR003549 | 1.859 | 4977 | PR004270 | 1.554 | 6103 |
| PR003550 | 1.321 | 5365 | Utomilumab | 0.3368 | 5271 |

| | | | | |
|---|---|---|---|---|
| Utomilumab | 0.3469 | 5389 | Urelumab | No binding |

| | |
|---|---|
| Urelumab | No binding |

| | |
|---|---|
| Experiment 1 | Experiment 2 |

### Example 5.7. T Cell Specific Activation Mediated by Target Cells Highly Expressing PD-L1

[0654] This example is intended to investigate the activity of the PD-L1×4-1BB bispecific antibody molecules to activate T cells by binding to 4-1BB in the presence of target cells. The target cells may be cells expressing PD-L1 at different levels, e.g., CHO-K1/hPDL1 (GenScript, M00543) highly expressing human PD-L1 or MDA-MB-231 (ATCC, HTB-26) highly expressing human PD-L1. The effector cells may be isolated human PBMCs or T cells.

[0655] Specifically, a 96-well plate (Corning, #3599) was coated first with 0.3 μg/mL anti-CD3 antibody OKT3 (Thermo, #16-0037-81) at 100 μL/well. Then, the density of human T cells (isolated from human PBMCs with a T cell isolation kit (Miltenyi, #130-096-535)) was adjusted to 2×10⁶ cells/mL, and the density of target cells was adjusted to 3×10⁵ cells/mL. The two cell suspensions were each seeded into a 96-well plate at 50 μL/well, with a final effector-to-target ratio of 20:3. Then, antibody molecules at different concentrations were added at 100 μL/well, wherein the antibody concentrations may be the final concentration of (10 nM, 1 nM) or 20 nM, or a total of 8 concentrations obtained by a 5-fold gradient dilution from the highest final concentration of 20 nM; and two duplicate wells were set for each concentration. hIgG1 iso (CrownBio, #C0001) and hIgG4 iso (CrownBio, #C0045) were used as controls. The 96-well plate was incubated in an incubator at 37° C. with 5% CO₂ for 3 days. Supernatants after 48 h and 72 h of culture were each collected. The IL-2 concentration in the 48-hour supernatant was determined using an IL-2 ELISA kit (Thermo, #88-7025-88), and the IFN-γ concentration in the 72-hour supernatant was determined using an IFN-γ ELISA kit (Thermo, #88-7316-77). The ELISA assay was performed by referring to the instructions of relevant kit. The data were processed and analyzed by plotting using a GraphPad Prism 8 software.

[0656] In this example, the anti-4-1BB monoclonal antibody Urelumab was used as a positive control molecule.

### Example 5.7.1. CHO-K1/hPDL1-Mediated T Cell Specific Activation

[0657] As shown in FIG. 30, in a system where a target cell CHO-K1/hPDL1 was mixed with a T cell, crosslinking-independent anti-4-1BB monoclonal antibody Urelumab was able to activate the T cell to release IFN-γ, while crosslinking-dependent anti-4-1BB monoclonal antibodies (PR000448, PR001758, PR001760, and PR001836) were hardly able to activate the T cell. The bispecific antibody molecules of FIT-Ig structures (PR003052 and PR000701), the bispecific antibody molecules of IgG-VH tetravalent symmetric structures (PR003549, PR003550, and PR003551) and the bispecific antibody molecule of a Fab-HCAb structure (PR004270) were all able to activate the T cell to release cytokines. This indicates that the activation of T cells by the bispecific antibody molecules is dependent on the specific activation of target cells. Moreover, the bispecific antibody molecules of IgG-VH tetravalent symmetric structures (PR003549 and PR003550) and the bispecific antibody molecule of a Fab-HCAb structure (PR004270) were able to cause higher release levels of cytokines and showed stronger T cell activation ability than the bispecific antibody molecules of FIT-Ig structures (PR003052 and PR000701); and those bispecific antibody molecules were superior to Urelumab. PR003549 and PR004270 had comparable or even stronger T cell activation ability than the control bispecific antibody molecule (PR001289).

### Example 5.7.2. MDA-MB-231-Mediated T Cell Specific Activation

[0658] As shown in FIG. 31 (A), in a system where a target cell MDA-MB-231 was mixed with a T cell, the bispecific antibody of an IgG-VH tetravalent symmetric structure (PR003549) and the bispecific antibody of a Fab-HCAb structure (PR004270) had similar T cell activation ability; and those bispecific antibodies were superior to the bispecific antibodies of FIT-Ig structures (PR003052 and PR000701) and a control bispecific antibody molecule (PR001289).

[0659] As shown in FIG. 31 (B-C) and Table 5-15, in a system where a target cell MDA-MB-231 was mixed with a T cell, the bispecific antibody molecule of an IgG-VH tetravalent symmetric structure (PR003549) had stronger T cell activation ability than Urelumab, and was able to better promote the production of IFN-γ (B) and IL-2 (C).

TABLE 5-15
Levels of cytokines

| | |
|---|---|
| IFN-γ | IL-2 |

| Antibody | EC₅₀ (nM) | Maximum | EC₅₀ (nM) | Maximum |
|---|---|---|---|---|
| PR003549 | 0.0695 | 16735 | 0.1203 | 1526 |
| Urelumab | 0.536 | 18131 | 2.944 | 1554 |

### Example 5.8. Mixed Lymphocyte Reaction (MLR)

[0660] This example is intended to investigate the T cell activation effect of PD-L1×4-1BB bispecific antibody molecules by the mixed lymphocyte reaction (MLR).

[0661] In the first step, monocytes were isolated from PBMCs (MT-Bio) of a first donor using CD14 magnetic beads (Meltenyi, #130-050-201) according to the instructions of the relevant kit. Then, 50 ng/mL of recombinant human IL-4 (PeproTech, #200-02-A) and 100 ng/mL of recombinant human GM-CSF (PeproTech, #300-03-A) were added, and after 7 days of induction at 37° C., immature dendritic cells (iDC cells) were obtained. 1 μg/mL lipopolysaccharide (LPS, Sigma, #L6529) was then added, and after 24 h of induction, mature dendritic cells (mDC cells) were obtained. In the second step, T lymphocytes were isolated from PBMCs (MT-Bio) of a second donor using a T cell isolation kit (Meltenyi, #130-096-535). In the third step, the obtained T cells and mDC cells were seeded in a 96-well plate (T cells at 1×10⁵/well and mDC cells at 2×10⁴/well) at a ratio of 5:1. Then, antibody molecules at different concentrations were added at 50 μL/well, wherein the antibody concentration may be the final concentration of (10 nM, 1 nM), or a total of 8 concentrations obtained by a 3-fold gradient dilution from the highest final concentration of 50 nM; and two duplicate wells were set for each concentration. hIgG1 iso (CrownBio, #C0001) or a blank well was used as a control. The cells were incubated in an incubator at 37° C. with 5% CO₂ for 5 days. In the fourth step, supernatants on day 3 and on day 5 were each collected. The IL-2 concentration in the 3-day supernatant was determined using an IL-2 ELISA kit (Thermo, #88-7025-77), and the IFN-γ concentration in the 5-day supernatant was determined using an IFN-γ ELISA kit (Thermo, #88-7316-88). The ELISA assay was performed by referring to the instructions of relevant kit.

[0662] As shown in FIG. 32 and FIG. 33, in two independent MLR experiments (with different donor pairings), the anti-4-1BB monoclonal antibodies had a limited T cell activation effect and weak cytokine production ability; while the anti-PD-L1 monoclonal antibodies had a relatively significant activation effect. The bispecific antibody molecules were able to further improve the function of T cells and were superior to the anti-PD-L1 monoclonal antibodies.

[0663] As shown in FIG. 32, the bispecific antibody molecules of IgG-VH tetravalent symmetric structures (PR003549, PR003550, and PR003551) were able to cause higher release levels of cytokines and showed stronger T cell activation ability than the antibody molecules of FIT-Ig structures (PR003052 and PR000701); and those bispecific antibody molecules were superior to the anti-PD-L1 monoclonal antibodies.

[0664] As shown in FIG. 33, the bispecific antibody molecules of IgG-VH tetravalent symmetric structures (PR003549 and PR003550) and the bispecific antibody molecule of a Fab-HCAb structure (PR004270) were able to cause higher release levels of cytokines and showed stronger T cell activation ability than the bispecific antibody molecules of FIT-Ig structures (PR003052 and PR000701). Moreover, the bispecific antibody molecules of IgG-VH structures or Fab-HCAb structures were able to stimulate the production of more IFN-γ as compared to the control bispecific antibody molecule (PR001289).

### Example 5.9. Pharmacokinetic Study

[0665] In this example, the pharmacokinetic properties of the PD-L1×4-1BB bispecific antibody molecule of a Fab-HCAb symmetric structure (PR004270) in mice were investigated.

[0666] The test was performed as follows: for each test antibody molecule, 6 female BALB/c mice weighing 18-22 g were selected and were administered with the bispecific antibody by intravenous injection at a dose of 5 mg/kg. The whole blood of 3 mice in one group was collected before the administration and 15 min, 24 h (1 day), 4 days and 10 days after the administration, and the whole blood of 3 mice in the other group was collected before the administration and 5 h, 2 days, 7 days and 14 days after the administration. The whole blood was left to stand for 30 min for coagulation and centrifuged, and the isolated serum sample was cryopreserved at −80° C. until it was taken for analysis. In this example, the drug concentration in the serum of mice was quantitatively determined by two ELISA methods. The ELISA method I, namely the Fc end detection (overall detection) method, was performed by capturing the antibody containing human Fc in the serum of mice using a goat anti-human Fc polyclonal antibody coating a 96-well plate, and then adding an HRP-labeled goat anti-human Fc secondary antibody; and the ELISA method II, namely the PD-L1-end detection (functional domain detection) method, was performed by capturing an antibody specifically recognizing PD-L1 in the serum of mice using a human PD-L1 protein coating a 96-well plate, and then adding an HRP-labeled goat anti-human Fc secondary antibody. Pharmacokinetic parameters were analyzed using Phoenix WinNonlin software version 8.2 by non-compartmental analysis (NCA).

[0667] As shown in FIG. 34 and Table 5-16, the bispecific antibody molecule of a Fab-HCAb structure (PR004270) had a similar serum half-life t_{1/2} value to a conventional IgG antibody, and the t_{1/2} value was more than 10 days as measured by the functional domain detection method.

TABLE 5-16
Pharmacokinetics of PR004270 in BALB/c mice

Bispecific antibody
molecules
PR004270
Animals (number)
BALB/c mice (n = 6)
Antibody dosage
5 mg/kg, I.V.

| | | PD-L1 end |
|---|---|---|
| PK parameters | Fc end detection | detection |
| T½ (hour) | 465.6 | 256.5 |
| Vd (mL/kg) | 75.7 | 83.9 |
| AUC (μg*hour/mL) | 17,536 | 13,126 |
| Cl (mL/hour/kg) | 0.11 | 0.23 |
| C0 (μg/mL) | 119.7 | 81.7 |

### Example 5.10. Summary

[0668] In this example, PD-L1×4-1BB bispecific antibody molecules of a variety of structures are constructed using the antigen-binding domain Fab of the anti-PD-L1 IgG antibody and the antigen-binding domain VH of the 4-1BB HCAb antibody. This shows the flexibility of constructing the molecular structure of bispecific antibodies based on HCAbs, and the T cell function-activating activity is regulated through different structure types, relative positions, binding valences and other parameters.

[0669] The activation of T cells by Urelumab is not target-specific, which is one of the causes for its clinical toxic and side effects. The T cell activation effect of PD-L1×4-1BB bispecific antibodies is specifically dependent on the expression of PD-L1. Crosslinking-dependent anti-4-1BB monoclonal antibodies are unable to directly activate T cells, but the PD-L1×4-1BB bispecific antibodies constructed using those anti-4-1BB monoclonal antibodies are able to specifically activate T cells in the presence of cells highly expressing PD-L1.

[0670] In one aspect, HCAb-based bispecific antibody structures, especially bispecific antibody molecules of IgG-VH tetravalent symmetric structures or bispecific antibody molecules of Fab-HCAb structures, retain the activity of the PD-L1 end and exhibit better T cell activation ability than the corresponding anti-PD-L1 parent monoclonal antibody in MLR experiments; in another aspect, the PD-L1 molecules highly expressed on target cells can mediate crosslinking and trimerization of 4-1BB to transmit T cell activation signals, and their T cell activation ability was even superior to that of Urelumab. Moreover, the bispecific antibody molecules of IgG-VH tetravalent symmetric structures or Fab-HCAb symmetric structures demonstrate better T cell activation ability than bispecific antibody molecules of FIT-Ig structures.

[0671] In conclusion, the PD-L1×4-1BB bispecific antibody molecules with good safety, outstanding functional activity and good molecular stability are constructed in this example.

### Example 6. B7H4×4-1BB Bispecific Antibodies

### Example 6.1. Background

[0672] B7-H4 (VTCN1, B7h.5, B7S1, B7×) is a transmembrane protein belonging to the B7/CD28 superfamily. The B7-H4 protein is expressed in some immune cells such as monocytes and dendritic cells, and is possibly involved in the negative regulation of immune response of T cells. In addition, B7H4 is highly expressed on the surface of tumor cells of breast cancer, ovarian cancer, endometrial cancer, non-small cell lung cancer, kidney cancer, etc., while it is not expressed or is very little expressed in most normal tissues. As an emerging target for these tumors, B7-H4 has received attention in recent years. Anti-B7-H4 antibodies can act on tumor cells through multiple mechanisms, but its development is mainly focused on monoclonal antibodies, and no bispecific antibody therapy is available at present.

[0673] 4-1BB (TNFRSF9, CD137) is a transmembrane protein belonging to the TNF receptor superfamily 4-1BB is a co-stimulatory molecule expressed on a variety of immune cells. It is a multifunctional modulator of immune activity. Its expression is induced in activated T cells, NK cells and other immune cells. 4-1BB activates T cells through trimerization mediated by its ligand 4-1BBL, promoting cell proliferation and cytokine release. Anti-4-1BB agonistic antibodies have the function of inhibiting tumors. The first 4-1BB antibodies to be subjected to clinical trials were Utomilumab from Pfizer and Urelumab (BMS-663513) from Bristol-Myers Squibb. The initial clinical results of Urelumab were published in 2008. Although encouraging efficacy was observed in some patients, the data showed urelumab to cause target and dose-associated hepatotoxicity. Moreover, two patients in the clinical trial died from hepatotoxicity, resulting in the discontinuation of related clinical trials. Utomilumab has better safety enabling the dose to be increased to 10 mg/kg, but still has a poor therapeutic effect.

[0674] In this example, we constructed bispecific antibodies targeting both B7H4 and 4-1BB to improve anti-tumor efficacy and safety through one or more mechanisms of action. Firstly, B7H4×4-1BB bispecific antibodies can activate T cells by relieving the negative regulatory signals of B7H4. Secondly, B7H4×4-1BB bispecific antibodies are enriched in tumor tissues with high B7H4 expression, and immune cells and tumor cells are combined together through the bispecific antibody molecules in a tumor microenvironment to promote the formation of immune synapses; meanwhile, the B7H4 molecules highly expressed on the surface of the tumor cells can promote the crosslinking of 4-1BB molecules on the surface of the T cell through bispecific antibody molecules, activate a downstream signaling pathway and provide a co-stimulation signal, thereby promoting the activation and proliferation of T cells and improving the anti-tumor activity. Thirdly, the anti-4-1BB agonistic antibodies used in this example have the function dependent on molecular crosslinking, and they can only mediate T cell activation using target cells in a tumor microenvironment to avoid the toxic and side effects caused by over-activation of T cells in normal tissues by monoclonal antibodies similar to Urelumab.

### Example 6.2. Acquisition of Anti-B7H4 IgG Antibodies and Anti-4-1BB HCAb Antibodies

### Example 6.2.1. Acquisition of Fully Human Anti-B7H4 H2L2 Antibodies

[0675] The Harbour H2L2 mouse (Harbour Antibodies BV) is a transgenic mouse carrying an immune repertoire of human immunoglobulins that produces antibodies with intact human antibody variable domains and rat constant domains.

[0676] Harbour H2L2 mice were subjected to multiple rounds of immunization with a soluble recombinant human B7H4-mFc fusion protein (Sino Biological Inc., #10738-H05H). When the titer of the B7H4-specific antibody in the serum of mice was detected to reach a certain level, spleen cells of the mice were taken and fused with a myeloma cell line to obtain hybridoma cells. After multiple rounds of screening and cloning of the hybridoma cells, several monoclonal antibody molecules specifically recognizing B7H4 were identified. The monoclonal antibodies were further identified, and several candidate antibody molecules were preferentially selected according to parameters such as the binding ability to human B7H4, the binding ability to cynomolgus monkey B7H4, and the internalization ability of target cell receptors. The candidate antibody molecules were then subjected to sequence analysis and optimization to obtain several variant sequences. The VL and VH sequences of the antibody were fused to the corresponding human κ light chain constant region and IgG1 heavy chain constant region sequences and expressed to obtain recombinant fully human antibody molecules. The recombinant fully human anti-B7H4 IgG antibodies PR002408 and PR002410 are listed in Table 6-9.

### Example 6.2.2. Acquisition of Fully Human Anti-4-1BB HCAb Antibodies

[0677] The fully human anti-4-1BB HCAb antibodies PR001758, PR001760, PR001771, PR001840 and PR004469 (Table 6-9) used in this example were derived from Harbour HCAb mice, and were found as described in Example 5.2.3.

[0678] The binding ability of the 4-1BB heavy chain antibodies to CHO-K1/hu 4-1BB cells (GenScript Biotech, M00538) was tested by flow cytometry FACS and the method described in Example 5.6. As shown in FIG. 28 (C-F), the 4-1BB heavy chain antibodies had similar binding ability to Utomilumab, and had superior binding ability to Urelumab.

### Example 6.3. Construction of Bispecific Antibody Molecules Using Anti-B7H4 IgG Antibodies and Anti-4-1BB HCAb Antibodies

[0679] In this example, B7H4×4-1BB bispecific antibody molecules of a variety of structures were constructed using the antigen-binding domain Fab of the anti-B7H4 IgG antibody PR002408 or PR002410 and the antigen-binding domain VH of the anti-4-1BB HCAb antibody PR001758, PR001760, PR001771, PR001840 or PR004469.

[0680] In this and subsequent examples, the anti-B7H4 IgG monoclonal antibody PR002408 was used as a positive control molecule, and was also the parent monoclonal antibody of the B7H4 end of the B7H4×4-1BB bispecific antibody molecules.

[0681] In this and subsequent examples, the anti-4-1BB IgG monoclonal antibody urelumab was used as a positive control molecule.

### Example 6.3.1. Construction of Molecules of Fab-HCAb Symmetric Structures

[0682] B7H4×4-1BB bispecific antibody molecules of Fab-HCAb symmetric structures were designed according to the structures described in Example 1.1 using anti-B7H4 IgG antibodies and anti-4-1BB heavy chain antibodies, with the results summarized in Table 6-1. The antibody molecule samples were prepared and analyzed according to the method described in Example 2, with the results summarized in Table 6-2.

TABLE 6-1
B7H4 × 4-1BB bispecific antibody molecules of Fab-HCAb
tetravalent symmetric structures

| | | | | First | Second | |
|---|---|---|---|---|---|---|
| | | | | linker | linker | |
| | | | | peptide | peptide | |
| | | | | (be- | (be- | |
| | | | | tween | tween | |
| Struc- | Bispecific | B7H4 | 4-1BB | Fab | VH_B | Fc type |
| ture | antibody | antibody | antibody | and | and | (mu- |
| No. | molecules | (IgG) | (VH_B) | VH_B) | CH2) | tation) |
| 1 | PR004279 | PR002408 | PR001760 | H1_15 | Human | Human |
| | | | | | IgG1 | IgG1 |
| | | | | | hinge | (L234A, |
| | | | | | (C220S) | L235A) |
| 1 | PR005189 | PR002408 | PR001760 | None | Human | Human |
| | | | | | IgG1 | IgG1 |
| | | | | | hinge | (L234A, |
| | | | | | (C220S) | L235A) |
| 2 | PR007165 | PR002408 | PR001760 | None | Human | Human |
| | | | | | IgG1 | IgG1 |
| | | | | | hinge | (L234A, |
| | | | | | (C220S) | L235A) |

TABLE 6-2
Expression of B7H4 × 4-1BB bispecific antibody molecule
proteins of Fab-HCAb tetravalent symmetric structures

| | | | Plasmid | | |
|---|---|---|---|---|---|
| | Bispecific | | transfection ratio | Yield (mg/L) | |
| Structure | antibody | Expression system | (short chain:long | after first | SEC-HPLC |
| No. | molecules | and volume | chain) | purification | purity (%) |
| 1 | PR004279 | HEK293-F (30 ml) | 1:1 | 11.375 | 79.18 |

### Example 6.3.2. Construction of Molecules of IgG-VH Tetravalent Symmetric Structure

[0683] B7H4×4-1BB bispecific antibody molecules of IgG-VH tetravalent symmetric structures were designed according to the structures described in Example 1.2 using anti-B7H4 IgG antibodies and anti-4-1BB heavy chain antibodies, with the results summarized in Table 6-3. The antibody molecule samples were prepared and analyzed according to the method described in Example 2, with the results summarized in Table 6-4.

TABLE 6-3
B7H4 × 4-1BB bispecific antibody molecules of IgG-VH
tetravalent symmetric structures

| | | | | VH_B | | |
|---|---|---|---|---|---|---|
| Struc- | Bispecific | B7H4 | 4-1BB | position | | Fc type |
| ture | antibody | antibody | antibody | relative | Linker | (mu- |
| No. | molecules | (IgG) | (VH_B) | to IgG | peptide | tation) |
| 5 | PR003334 | PR002408 | PR001758 | C- | H1_ | Human |
| | | | | terminus | 15-RT | IgG1 |
| | | | | of heavy | | (L234A, |
| | | | | chain | | L235A) |
| 5 | PR003335 | PR002408 | PR001760 | C- | H1_ | Human |
| | | | | terminus | 15-RT | IgG1 |
| | | | | of heavy | | (L234A, |
| | | | | chain | | L235A) |
| 5 | PR003338 | PR002408 | PR004469 | C- | H1_ | Human |
| | | | | terminus | 15-RT | IgG1 |
| | | | | of heavy | | (L234A, |
| | | | | chain | | L235A) |

TABLE 6-4
B7H4 × 4-1BB bispecific antibody molecule proteins
of IgG-VH tetravalent symmetric structures

| | | Ex- | Plasmid | | | |
|---|---|---|---|---|---|---|
| | | pression | transfection | Yield | SEC- | |
| Struc- | Bispecific | system | ratio (short | (mg/L) | HPLC | DSF |
| ture | antibody | and | chain:long | after first | purity | Tm1 |
| No. | molecules | volume | chain) | purification | (%) | (° C.) |
| 5 | PR003334 | ExpiCHO | 3:2 | 38.2 | 97.98 | 60.32 |
| | | (200 ml) | | | | |
| 5 | PR003335 | ExpiCHO | 3:2 | 68.9 | 99.29 | 65.59 |
| | | (200 ml) | | | | |
| 5 | PR003338 | HEK293-F | 3:2 | 74.6 | 98.02 | 62.17 |
| | | (10 ml) | | | | |

### Example 6.3.3. Construction of Molecules of IgG-VH(2) Hexavalent Symmetric Structures

[0684] B7H4×4-1BB bispecific antibody molecules of IgG-VH(2) hexavalent symmetric structures were designed according to the structures described in Example 1.3 using anti-B7H4 IgG antibodies and anti-4-1BB heavy chain antibodies, with the results summarized in Table 6-5. The antibody molecule samples were prepared and analyzed according to the method described in Example 2, with the results summarized in Table 6-6.

TABLE 6-5
B7H4 × 4-1BB bispecific antibody molecules of IgG-VH(2)
hexavalent symmetric structures

| | | | | | Second | |
|---|---|---|---|---|---|---|
| | | | | First | linker | |
| | | | | linker | peptide | |
| | | | | peptide | (between | |
| Struc- | Bispecific | B7H4 | 4-1BB | (between | VH_B | Fc type |
| ture | antibody | antibody | antibody | Fc and | and | (mu- |
| No. | molecules | (IgG) | (VH_B) | VH_B) | VH_B) | tation) |
| 7 | PR003487 | PR002408 | PR001760 | H1_ | None | Human |
| | | | | 15-RT | | IgG1 |
| | | | | | | (L234A, |
| | | | | | | L235A) |
| 7 | PR003488 | PR002408 | PR001760 | H1_ | GS_5 | Human |
| | | | | 15-RT | | IgG1 |
| | | | | | | (L234A, |
| | | | | | | L235A) |

TABLE 6-6
Expression of B7H4x4-1BB bispecific antibody molecule proteins
of IgG-VH(2) hexavalent symmetric structures

| | Bispecific | Expression | Yield (mg/L) | |
|---|---|---|---|---|
| Structure | antibody | system | after first | SEC-HPLC |
| No. | molecules | and volume | purification | purity (%) |
| 7 | PR003487 | HEK293-F (30 ml) | 19 | 84 |
| 7 | PR003488 | HEK293-F (30 ml) | 17.39 | 85 |

### Example 6.3.4. Construction of Molecules of Fab-Fc-VH(n) Asymmetric Structures

[0685] B7H4×4-1BB bispecific antibody molecules of Fab-Fc-VH(n, n={2,3}) asymmetric structures were designed according to the structures described in Example 1.6 and Example 1.9 using anti-B7H4 IgG antibodies and anti-4-1BB heavy chain antibodies, with the results summarized in Table 6-7. The antibody molecule samples were prepared and analyzed according to the method described in Example 2, with the results summarized in Table 6-8. The mutation based on the “knob-into-hole” structure was used and the L234A and L235A double mutation was introduced in the Fc region of the molecules.

TABLE 6-7
B7H4 × 4-1BB bispecific antibody molecules of
Fab-Fc-VH(n) asymmetric structures

| | | | | | Number | | |
|---|---|---|---|---|---|---|---|
| | | | | | of | | |
| | | | | | repetition | | |
| | Bispecific | B7H4 | 4-1BB | Structure | n for | First | Second |
| Structure | antibody | antibody | antibody | of Fab | VH_ | linker | linker |
| No. | molecules | (Fab) | (VH_B) | end | B | peptide | peptide |
| 14 | PR004160 | PR002410 | PR001760 | Normal | 2 | GS_15 | None |
| 26 | PR004161 | PR002410 | PR001760 | Normal | 3 | GS_15 | AS- |
| | | | | | | | GS_15 |
| 26 | PR004181 | PR002410 | PR001771 | Normal | 3 | GS_15 | GS_15 |
| 26 | PR004182 | PR002410 | PR001840 | Normal | 3 | GS_15 | GS_15 |

TABLE 6-8
Expression of B7H4x4-1BB bispecific antibody molecule
proteins of Fab-Fc-VH(n) asymmetric structures

| | | | | Yield | SEC- |
|---|---|---|---|---|---|
| Struc- | Bispecific | Expression | Plasmid | (mg/L) | HPLC |
| ture | antibody | system | transfection | after first | purity |
| No. | molecules | and volume | ratio | purification | (%) |
| 14 | PR004160 | HEK293-F (30 ml) | 1:1:1 | 29.36 | 89.41 |
| 26 | PR004161 | HEK293-F (30 ml) | 1:1:1 | 31.62 | 85.47 |
| 26 | PR004181 | HEK293-F (30 ml) | 1:1:1 | 87.25 | 87.19 |
| 26 | PR004182 | HEK293-F (30 ml) | 1:1:1 | 24.75 | 79.14 |

### Example 6.3.5. Sequences of B7H4×4-1BB Bispecific Antibody Molecules and Control Molecules

[0686] The sequence numbers corresponding to the sequences of the B7H4×4-1BB bispecific antibody molecules constructed in this example, the corresponding parent monoclonal antibody molecules such as the B7H4 monoclonal antibody and the 4-1BB monoclonal antibody, and the control molecules are listed in Table 6-9, Table 6-10 and Table 6-11. The structure numbers in Table 6-11 correspond to those in Table 1-1 and FIG. 1. The sequence numbers of the corresponding CDR sequences of the first and second antigen-binding domains of the bispecific antibody molecules are listed in Table 6-12.

TABLE 6-9
Control molecules and parent monoclonal antibodies

| Antibody No. | Antibody |
|---|---|
| PR002408 | Anti-B7H4 monoclonal antibody |
| | 80C8-2E9 (H: G55A; L: N92Q), hIgG1 |
| PR002410 | Anti-B7H4 monoclonal antibody |
| | 1025_B-1H11 (L: C87Y), hIgG1 |
| PR001758 | Anti-4-1BB heavy-chain antibody 1016P0010B11, hIgG1 |
| PR001760 | Anti-4-1BB heavy-chain antibody 1016P0011G10, hIgG1 |
| PR001771 | Anti-4-1BB heavy-chain antibody 1016P0042C5, hIgG1 |
| PR001840 | Anti-4-1BB heavy-chain antibody 1016P0037D2, hIgG1 |
| PR004469 | Anti-4-1BB heavy-chain antibody PR001838_G53A, hIgG1 |
| PR000628 | Anti-4-1BB monoclonal antibody |
| | urelumab analog, hIgG4 (S228P) |

TABLE 6-10
Sequence numbers of sequences and CDR sequences of control
molecules and parent monoclonal antibodies

| Antibody | Light | Heavy | | | | | | | | |
|---|---|---|---|---|---|---|---|---|---|---|
| No. | chain | chain | VL | VH | LCDR1 | LCDR2 | LCDR3 | HCDR1 | HCDR2 | HCDR3 |
| PR002408 | 360 | 326 | 298 | 261 | 180 | 191 | 225 | 32 | 87 | 143 |
| PR002410 | 361 | 327 | 299 | 262 | 177 | 191 | 226 | 33 | 88 | 144 |
| PR001758 | None | 320 | None | 252 | None | None | None | 27 | 79 | 137 |
| PR001760 | None | 321 | None | 253 | None | None | None | 28 | 80 | 138 |
| PR001771 | None | 322 | None | 254 | None | None | None | 28 | 81 | 139 |
| PR001840 | None | 324 | None | 256 | None | None | None | 15 | 83 | 140 |
| PR004469 | None | 329 | None | 264 | None | None | None | 28 | 89 | 145 |
| PR000628 | 358 | 314 | 292 | 246 | 175 | 195 | 219 | 18 | 73 | 131 |

TABLE 6-11
Sequence numbers of B7H4x4-1BB bispecific antibody
molecules of this example

| Structure | Antibody | Polypeptide chain 1 | Polypeptide chain 2 |
|---|---|---|---|
| No. | No. | (short chain) | (long chain) |
| 5 | PR003334 | 360 | 455 |
| 5 | PR003335 | 360 | 456 |
| 5 | PR003338 | 360 | 457 |
| 7 | PR003487 | 360 | 458 |
| 7 | PR003488 | 360 | 459 |
| 1 | PR004279 | 487 | 488 |
| 1 | PR005189 | 487 | 520 |
| 2 | PR007165 | 360 | 523 |
| 14 | PR004160 | 361 | 481 |
| 26 | PR004161 | 361 | 481 |
| 26 | PR004181 | 361 | 481 |
| 26 | PR004182 | 361 | 481 |

TABLE 6-12
Sequence numbers of CDRs of antigen-binding domains of
B7H4 × 4-1BB bispecific antibody molecules

| | | Antigen- | | | | | | |
|---|---|---|---|---|---|---|---|---|
| | | binding | | | | | | |
| Structure | Antibody | domain | | | | | | |
| No. | No. | No. | LCDR1 | LCDR2 | LCDR3 | HCDR1 | HCDR2 | HCDR3 |
| 1 | PR004279, | #1 | 180 | 191 | 225 | 32 | 87 | 143 |
| | PR005189 | #2 | None | None | None | 28 | 80 | 138 |
| 2 | PR007165 | #1 | 180 | 191 | 225 | 32 | 87 | 143 |
| | | #2 | None | None | None | 28 | 80 | 138 |
| 5 | PR003334 | #1 | 180 | 191 | 225 | 32 | 87 | 143 |
| | | #2 | None | None | None | 27 | 79 | 137 |
| 5 | PR003335 | #1 | 180 | 191 | 225 | 32 | 87 | 143 |
| | | #2 | None | None | None | 28 | 80 | 138 |
| 5 | PR003338 | #1 | 180 | 191 | 225 | 32 | 87 | 143 |
| | | #2 | None | None | None | 28 | 89 | 145 |
| 7 | PR003487, | #1 | 180 | 191 | 225 | 32 | 8' | 143 |
| | PR003488 | #2 | None | None | None | 28 | 80 | 138 |
| 14 | PR004160 | #1 | 177 | 191 | 226 | 33 | 88 | 144 |
| | | #2 | None | None | None | 28 | 80 | 138 |
| 26 | PR004161 | #1 | 177 | 191 | 226 | 33 | 88 | 144 |
| | | #2 | None | None | None | 28 | 80 | 138 |
| 26 | PR004181 | #1 | 177 | 191 | 226 | 33 | 88 | 144 |
| | | #2 | None | None | None | 28 | 81 | 139 |
| 26 | PR004182 | #1 | 177 | 191 | 226 | 33 | 88 | 144 |
| | | #2 | None | None | None | 15 | 83 | 140 |

### Example 6.4. Binding to B7H4

[0687] This example is intended to investigate the binding activity of the B7H4×4-1BB bispecific antibody molecules to B7H4.

### Example 6.4.1. Binding to SK-BR-3 Cells Highly Expressing Human B7H4

[0688] The binding ability of the antibodies to a tumor cell line SK-BR-3 (ATCC, HTB-30) highly expressing human B7H4 was tested by flow cytometry FACS. Specifically, SK-BR-3 cells were digested and resuspended in a complete medium, with the cell density adjusted to 2×10⁶ cells/mL. Then, the cells were seeded in a 96-well V-bottom plate (Corning, #3894) at 50 μL/well. Then, antibody molecules at a total of 8 concentrations obtained by a 5-fold gradient dilution were added at 50 μL/well, and the mixture was mixed well. hIgG1 iso (CrownBio, #C0001) was used as an isotype control. The cells were incubated at 4° C. for 2 h away from light. Then, the cells in each well were then rinsed twice with 100 μL of pre-cooled PBS buffer and centrifuged at 500 g at 4° C. for 5 min, and then the supernatant was discarded. Thereafter, a fluorescent secondary antibody (Alexa Fluor 647-conjugated AffiniPure Goat Anti-Human IgG, Fcγ Fragment Specific, Jackson ImmunoResearch, #109-605-098, diluted in a 1:1000 ratio) was added at 100 μL/well, and the plate was incubated at 4° C. for 1 h away from light. Then, the cells in each well were then rinsed twice with 100 μL of pre-cooled PBS buffer and centrifuged at 500 g at 4° C. for 5 min, and then the supernatant was discarded. Finally, a pre-cooled FACS buffer (PBS buffer containing 0.5% BSA) was added at 200 μL/well to resuspend the cells. Fluorescence signal values were read using a BD FACS CANTOII flow cytometer or an ACEA NovoCyte flow cytometer (ACEA Biosciences Inc.), and the data were processed and analyzed using FlowJo v10 (FlowJo, LLC) software. The data were processed and analyzed by plotting using GraphPad Prism 8 software, and binding curves of the antibodies to target cells, EC₅₀ values and other parameters were obtained through four-parameter nonlinear fitting.

[0689] As shown in FIG. 35 and Table 6-13, the bispecific antibody molecules were all able to bind to SK-BR-3 cells. As shown in FIG. 35 (A-C), the bispecific antibody molecules of symmetric structures (PR003334, PR003335, PR003338, PR003487, PR003488, and PR004279) had identical bivalent B7H4-binding domain (derived from the anti-B7H4 monoclonal antibody PR002408), and had very close EC₅₀ for binding to B7H4. The bispecific antibody molecules of IgG-VH-VH hexavalent symmetric structures (PR003487 and PR003488) had almost identical binding ability to B7H4 to the bispecific antibody molecule of an IgG-VH tetravalent symmetric structure (PR003335). The bispecific antibody molecule of a Fab-HCAb symmetric structure (PR004279) had slightly stronger binding activity to B7H4 than the bispecific antibody molecule of an IgG-VH structure (PR003335). As shown in FIG. 35 (D-E), the bispecific antibody molecules of asymmetric structures (PR004160, PR004161, PR004181, and PR004182) had only one B7H4-binding domain and thus had weaker binding ability to B7H4 than the bispecific antibody molecules of symmetric structures, but PR004182 still had similar binding EC₅₀ to the bispecific antibody molecules of symmetric structures. As shown in FIG. 35 (F), the bispecific antibody molecules of Fab-HCAb symmetric structures, whether the molecule of the structure (1) (PR005189) or the molecule of the structure (2) (PR007165), had almost identical binding activity, indicating that the fusion of the CL of Fab to the heavy chain where VH_B is located does not affect the binding activity of the Fab end.

TABLE 6-13
Binding to SK-BR-3

| | | Maxi- | | | Maxi- | | | Maxi- |
|---|---|---|---|---|---|---|---|---|
| | EC₅₀ | mum | | EC₅₀ | mum | | EC₅₀ | mum |
| Antibody | (nM) | MFI | Antibody | (nM) | MFI | Antibody | (nM) | MFI |
| PR003334 | 0.9685 | 254417 | PR003335 | 2.725 | 127965 | PR004279 | 0.6201 | 25718 |
| PR003335 | 1.102 | 244159 | PR003487 | 2.593 | 131617 | PR003335 | 1.108 | 25113 |
| PR003338 | 0.8207 | 241092 | PR003488 | 2.626 | 132285 | PR004181 | 9.254 | 41920 |
| PR007165 | 3.462 | 37793 | PR004160 | 11.33 | 32312 | PR004182 | 2.616 | 43637 |
| PR005189 | 3.173 | 37457 | PR004161 | 23.44 | 41230 | | | |
| PR002408 | 2.853 | 36029 | | | | | | |

### Example 6.5. Binding to 4-1BB

[0690] This example is intended to investigate the binding activity of the B7H4×4-1BB bispecific antibody molecules to 4-1BB.

### Example 6.5.1. Binding to CHO-K1 Cells CHO-K1/Hu4-1BB Highly Expressing Human 4-1BB

[0691] The binding ability of the antibody molecules to a CHO-K1 cell line CHO-K1/hu 4-1BB (GenScript Biotech, M00538) highly expressing human 4-1BB was tested by flow cytometry FACS. Specifically, the cells were digested and resuspended in a complete medium, with the cell density adjusted to 2×10⁶ cells/mL. Then, the cells were seeded in a 96-well V-bottom plate (Corning, #3894) at 100 μL/well (2×10⁵ cells/well) and centrifuged at 4° C. for 5 min, and the supernatant was discarded. Then, the antibody molecules at a total of 8 concentrations obtained by a 5-fold gradient dilution were added into a 96-well plate at 100 μL/well, and the mixture was mixed well. hIgG1 iso (CrownBio, #C0001) was used as an isotype control. The cells were incubated at 4° C. for 1 h away from light. Then, the cells in each well were rinsed twice with 100 μL of pre-cooled PBS buffer, and centrifuged at 500 g at 4° C. for 5 min, and then the supernatant was discarded. Thereafter, a fluorescent secondary antibody (Alexa Fluor® 488, Goat Anti-Human IgG, Fcγ fragment specific, Jackson ImmunoResearch, #109-545-098, diluted in a 1:1000 ratio) was added at 100 μL/well, and the plate was incubated at 4° C. for 1 h away from light. Then, the cells in each well were then rinsed twice with 200 μL of pre-cooled PBS buffer and centrifuged at 500 g at 4° C. for 5 min, and then the supernatant was discarded. Finally, a pre-cooled FACS buffer (PBS buffer containing 0.5% BSA) was added at 200 μL/well to resuspend the cells. Fluorescence signal values were read using a BD FACS CANTOII flow cytometer or an ACEA NovoCyte flow cytometer, and the data were processed and analyzed using FlowJo v10 (FlowJo, LLC) software. The data were processed and analyzed by plotting using GraphPad Prism 8 software, and binding curves of the antibodies to target cells, EC₅₀ values and other parameters were obtained through four-parameter nonlinear fitting.

[0692] In this example, the anti-4-1BB monoclonal antibody Urelumab was used as a positive control molecule. The results are shown in FIG. 36 and Table 6-14.

[0693] As shown in FIG. 36, the bispecific antibody molecules were all able to bind to CHO-K1/hu 4-1BB cells, and had very similar EC₅₀ in binding curves. As shown in FIG. 36 (A), the bispecific antibody molecules of IgG-VH tetravalent symmetric structures had greater maximum MFI values for binding to 4-1BB than Urelumab; as shown in FIG. 36 (B), the bispecific antibody molecules of IgG-VH-VH hexavalent symmetric structures had similar binding activity to 4-1BB to Urelumab; as shown in FIG. 36 (C), the bispecific antibody molecule of a Fab-HCAb symmetric structure (PR004279) had slightly stronger binding activity to 4-1BB than the bispecific antibody molecule of an IgG-VH structure (PR003335); as shown in FIG. 36 (D-E), the bispecific antibody molecules of Fab-Fc-VH(n) asymmetric structures had a similar EC₅₀ value but a higher maximum MFI value for binding to 4-1BB as compared to Urelumab; and as shown in FIG. 36 (F), the bispecific antibody molecules of Fab-HCAb symmetric structures, whether the molecule of the structure (1) (PR005189) or the molecule of the structure (2) (PR007165), had similar binding activity to 4-1BB, and were comparable to the parent monoclonal antibody PR001760.

TABLE 6-14
Binding to CHO-K1/hu 4-1BB

| | | Maximum | | | Maximum | | | Maximum |
|---|---|---|---|---|---|---|---|---|
| Antibody | EC₅₀ (nM) | MFI | Antibody | EC₅₀ (nM) | MFI | Antibody | EC₅₀ (nM) | MFI |
| PR003334 | 0.4831 | 162519 | PR003487 | 0.755 | 95740 | PR004279 | 0.5035 | 104957 |
| PR003335 | 0.7395 | 173076 | PR003488 | 0.7735 | 98153 | PR003335 | 1.349 | 91013 |
| PR003338 | 0.6708 | 163354 | Urelumab | 0.7945 | 101473 | | | |
| Urelumab | 0.4241 | 118060 | | | | | | |
| PR007165 | 3.996 | 71246 | PR004160 | 1.943 | 158311 | PR004181 | 0.4487 | 69865 |
| PR005189 | 4.255 | 92381 | PR004161 | 1.266 | 126124 | PR004182 | 0.6107 | 71139 |
| PR001760 | 3.761 | 83588 | Urelumab | 1.506 | 88235 | Urelumab | 0.4488 | 63326 |

### Example 6.6. T Cell Specific Activation Mediated by Target Cells Highly Expressing B7H4

[0694] This example is intended to investigate the activity of the B7H4×4-1BB bispecific antibody molecules to activate T cells by binding to 4-1BB in the presence of target cells. The target cells may be cells expressing B7H4 to different degrees, such as SK-BR-3 (ATCC, HTB-30) highly expressing B7H4 or JIMT-1 (DSMZ, ACC 589) not expressing B7H4. The effector cells may be isolated human PBMCs or T cells.

[0695] Specifically, anti-CD3 antibody OKT3 (Thermo, #16-0037-81) was firstly used for coating a 96-well plate (Corning, #3799). Then, the density of human T cells was adjusted to 3×10⁶ cells/mL, and the density of target cells was adjusted to 3×10⁵ cells/mL. The two cell suspensions were each seeded into a 96-well plate at 50 μL/well, with a final effector-to-target ratio of 10:1. Then, antibody molecules at different concentrations were added at 50 μL/well, wherein the concentrations are a total of 6 concentrations obtained by a 5-fold gradient dilution, and two duplicate wells were set for each concentration. hIgG1 iso (CrownBio, #C0001) and hIgG4 iso (CrownBio, #C0045) were used as controls. The 96-well plate was incubated in an incubator at 37° C. with 5% CO₂ for 2 days. After the incubation was completed, 100 μL of the supernatant was taken and added into another 96-well plate (Corning, #3599), and the mixture was centrifuged at 500 g at 4° C. for 5 min 50 μL of the supernatant was taken for the measurement of the level of cytokines. The concentration of IL-2 in the supernatant was determined using an IL-2 ELISA kit (Thermo, #88-7025-88), and the concentration of IFN-γ in the supernatant was determined using an IFN-γ ELISA kit (Thermo, #88-7316-88). The ELISA assay was performed by referring to the instructions of relevant kit. The data were processed and analyzed by plotting using a GraphPad Prism 8 software.

[0696] In this example, the anti-4-1BB monoclonal antibody Urelumab was used as a positive control molecule.

### Example 6.6.1. SK-BR-3-Mediated T Cell Specific Activation

[0697] As shown in FIG. 37 and FIG. 38, in the presence of SK-BR-3 cells highly expressing B7-H4, the B7-H4×4-1BB bispecific antibody molecules had superior T cell activation ability to positive control molecules, as evidenced by the higher release of the cytokines IFN-γ (FIG. 37) or IL-2 (FIG. 38) produced in this system than that produced in the positive control molecules.

[0698] As shown in FIG. 37 (A-B) and FIG. 38 (A), the bispecific antibodies of IgG-VH tetravalent symmetric structures (PR003334, PR003335, and PR003338) had slightly stronger T cell activation ability than Urelumab, and PR003335 and PR003338 had slightly stronger T cell activation ability than PR003334.

[0699] As shown in FIG. 37 (C) and FIG. 38 (B), the bispecific antibodies of IgG-VH-VH hexavalent symmetric structures (PR003487 and PR003488) had significantly stronger T cell activation ability than the bispecific antibodies of IgG-VH tetravalent structures (PR003334 and PR003335) and Urelumab.

[0700] As shown in FIG. 38 (C), the bispecific antibody of a Fab-HCAb symmetric structure (PR004279) had slightly stronger T cell activation ability than Urelumab.

[0701] As shown in FIG. 38 (D-F), the bispecific antibodies of Fab-Fc-VH(n) asymmetric structures (PR004160, PR004161, PR004181, and PR004182) were able to stimulate the IL-2 production by T cells. PR004160 and PR004161 had identical sequences of the 4-1BB-binding domain (VH), but PR004160 had two VH domains in tandem (i.e., the Fab-Fc-VH(2) structure), while PR004161 had three VH domains in tandem (i.e., the Fab-Fc-VH(3) structure). PR004161 had significantly stronger T cell activation ability than PR004160 and Urelumab. PR004181 and PR004182 of similar Fab-Fc-VH(3) structures also showed superior T cell activation ability to Urelumab. Although those bispecific antibodies of asymmetric structures had only one B7H4-binding domain and had weaker binding ability to B7H4 than the bispecific antibodies of symmetric structures, they were still able to mediate the T cell activation using cells highly expressing B7-H4, and had superior activation ability to Urelumab.

### Example 6.6.2. Influence of the Expression of B7H4 on the T Cell Activation

[0702] As shown in FIG. 39, the T cell activation by the B7H4×4-1BB bispecific antibody was specifically dependent on the expression of B7H4. (A) The bispecific antibody PR003334 was able to specifically activate T cells to release IL-2 in the presence of SK-BR-3 cells highly expressing B7H4; and (B) PR003334 was unable to activate T cells in the presence of JIMT-1 cells not expressing B7H4. Urelumab had no target specificity, so it was able to activate T cells even without expression of B7H4.

### Example 6.7. Serum Stability

[0703] In this example, the stability of B7H4×4-1BB bispecific antibody molecules of IgG-VH symmetric structures (PR003334 and PR003335) in high concentrations of human sera was investigated. Specifically, the bispecific antibody molecules were diluted in a 3-fold gradient with 90% human serum at an initial concentration of 100 nM for a total of 8 concentration points. The samples at each concentration were divided into 6 aliquots, incubated at 37° C. for 0 day, 1 day, 2 days, 4 days, 7 days and 14 days, quickly frozen with liquid nitrogen, and stored at −40° C. Then, samples were collected after incubation in serum for different periods of time, and tested for the binding activity of the bispecific antibody molecules to SK-BR-3 cells and CHOK1/hu 4-1BB cells according to the methods described in Example 6.4.1 and Example 6.5.1, to investigate the change in the binding activity of the bispecific antibody molecules after incubation in serum for different periods of time.

[0704] The bispecific antibody molecules PR003334 (FIG. 40, Table 6-15) and PR003335 (FIG. 41, Table 6-16) were stable in human serum, and showed no significant change in the binding activity of both the B7H4 and 4-1BB ends even after 14 days of incubation.

TABLE 6-15
Binding activity of PR003334 to target cells after incubation in
serum for different periods of time

| | Binding to SK-BR-3 | | Binding to CHO-K1/hu 4-1BB | |
|---|---|---|---|---|
| | | Maximum | | Maximum |
| PR003334 | EC₅₀ (nM) | MFI | EC₅₀ (nM) | MFI |
| Day one | 1.707 | 186430 | 0.841 | 360239 |
| Day two | 1.912 | 168183 | 0.769 | 397943 |
| Day four | 1.562 | 147497 | 0.607 | 374153 |
| Day seven | 2.004 | 160471 | 0.68 | 381546 |
| Day | 1.489 | 164959 | 0.851 | 383431 |
| fourteen | | | | |

TABLE 6-16
Binding activity of PR003335 to target cells after incubation in serum for
different periods of time

| | Binding to SK-BR-3 | | Binding to CHO-K1/hu 4-1BB | |
|---|---|---|---|---|
| PR003335 | EC₅₀ (nM) | Maximum MFI | EC₅₀ (nM) | Maximum MFI |
| Day one | 1.285 | 112575 | 0.470 | 432153 |
| Day two | 1.039 | 102557 | 0.457 | 396669 |
| Day four | 1.072 | 120474 | 0.624 | 389379 |
| Day seven | 1.41 | 93520 | 0.820 | 410577 |
| Day | 0.6645 | 78631 | 0.561 | 391641 |
| fourteen | | | | |

### Example 6.8. Pharmacokinetic Study

[0705] In this example, the pharmacokinetic properties of the B7H4×4-1BB bispecific antibody molecules of IgG-VH symmetric structures (PR003334 and PR003335) in mice were investigated.

[0706] The test was performed as follows: for each test antibody molecule, 6 female C57BL/6 mice weighing 18-22 g were selected and were administered with the bispecific antibody by intravenous injection at a dose of 5 mg/kg. The whole blood of 3 mice in one group was collected before the administration and 15 min, 24 h (1 day), 4 days and 10 days after the administration, and the whole blood of 3 mice in the other group was collected before the administration and 5 h, 2 days, 7 days and 14 days after the administration. The whole blood was left to stand for 30 min for coagulation and centrifuged at 2,000 rpm at 4° C. for 5 min, and the isolated serum sample was cryopreserved at −80° C. until it was taken for analysis. In this example, the drug concentration in the serum of mice was quantitatively determined by two ELISA methods. The ELISA method I, namely the Fc end detection (overall detection) method, was performed by capturing the protein containing human Fc in the serum of mice using a goat anti-human Fc polyclonal antibody coating a 96-well plate, and then adding an HRP-labeled goat anti-human Fc secondary antibody; and the ELISA method II, namely the 4-1BB end detection (functional domain detection) method, was performed by capturing the antigen-binding protein specifically recognizing human 4-1BB in the serum of mice using a human 4-1BB protein (Acro biosystems, #41B-H5227) coating a 96-well plate, and then adding an HRP-labeled goat anti-human Fc secondary antibody. Pharmacokinetic parameters were analyzed using Phoenix WinNonlin software version 8.2 by non-compartmental analysis (NCA).

[0707] As shown in FIG. 42 and Table 6-17, the bispecific antibody molecules of IgG-VH structures (PR003334 and PR003335) had similar pharmacokinetics to conventional IgG antibodies: under the overall detection method, the serum half-life t_{1/2} values of PR003334 and PR003335 in mice were about 8 days and 14 days, respectively; and under the functional domain detection method, the serum half-life t_{1/2} values of PR003334 and PR003335 in mice were about 9 days and 12 days, respectively.

TABLE 6-17
Pharmacokinetics of B7H4x4-1BB bispecific antibody molecules
in C57BL/6 mice

| Bispecific antibody | PR003334 | | PR003335 | |
|---|---|---|---|---|
| molecules | | | | |
| Animals (number) | C57BL/6 mice (n = 6) | | C57BL/6 mice (n = 6) | |
| Antibody dosage | 5 mg/kg, I.V. | | 5 mg/kg, I.V. | |
| | | 4-1BB end | Fc end | 4-1BB end |
| PK parameters | Fc end detection | detection | detection | detection |
| T1/2 (hour) | 193 | 218 | 336 | 295 |
| Vd (mL/kg) | 76 | 89 | 81 | 81 |
| AUC (μg*hour/mL) | 12,680 | 11,471 | 14,813 | 14,286 |
| Cl (mL/hour/kg) | 0.28 | 0.28 | 0.17 | 0.19 |
| CO (μg/mL) | 111 | 114 | 123 | 124 |

### Example 6.9. Anti-Tumor Efficacy of Bispecific Antibody Molecules

[0708] In this example, the anti-tumor efficacy of B7H4×4-1BB bispecific antibody molecule PR003334 in a BALB/c-hCD137/CT26-hB7H4 mouse tumor model was investigated.

[0709] The test was performed as follows: female BALB/c-hCD137 mice (BALB/c mice introduced with exogenous human 4-1BB transgene, GemPharmatech) aged 6-8 weeks were selected, and were inoculated subcutaneously with CT26-hB7H4 tumor cells (mouse colon cancer cells CT26 introduced with exogenous human B7H4 transgene, Harbour BioMed) in the logarithmic growth phase on the right dorsal side of the experimental mice at a dose of 5×10⁵ cells/mouse. When the mean tumor volume reached 80 mm³, the mice were randomized into groups of 6. On the day of grouping, the drug diluted with PBS at a specific concentration was administered by intraperitoneal injection (i.p.), twice a week for a total of 6 doses (BIW×3), with PBS as a blank control group. Tumor volume and body weight of mice were measured on the day of the first administration and on days 4, 7, 11, 14 and 18 thereafter. The tumor volume was calculated as follows: tumor volume (mm³)=0.5×(long diameter of tumor×short diameter of tumor²). After the experiment was completed, tumor-bearing mice were euthanized, stripped of tumors and weighed. The tumor volume, body weight, and the like of mice in each group were calculated and the results were expressed as mean±standard error (Mean±SEM). The different treatment groups were separately compared with the control group for any significant difference by one-way analysis of variance (one-way ANOVA).

[0710] In this example, the anti-4-1BB monoclonal antibody Urelumab was used as a positive control molecule. The dose of 6 mpk (mg/kg) for the bispecific antibody molecule PR003334 and the dose of 5 mpk for Urelumab were equivalent doses at the same molar concentration (converted according to molecular weight); and the dose of 18 mpk for the bispecific antibody molecule PR003334 and the dose of 15 mpk for Urelumab were equivalent doses at the same molar concentration. An anti-mouse PD-1 antibody (Bio X Cell, clone RMP1-14, #BE0146) at a dose of 10 mpk was also used as a control molecule. PBS was used as a blank control group.

[0711] As shown in FIG. 43, the bispecific antibody molecule PR003334 and Urelumab both had the efficacy of inhibiting the tumor growth in each dose group, and were superior to the PD-1 antibody (A). The change in body weight of mice in each group was within the normal range (B).

### Example 6.10. Determination of Stability and Physicochemical Properties of Bispecific Antibody Molecules by UNcle

[0712] In this example, the physicochemical properties such as molecular stability of the B7H4×4-1BB bispecific antibody molecules of IgG-VH symmetric structures (PR003334, PR003335, and PR003338) were determined by the method described in Example 2.5. As shown in Table 6-18, those bispecific antibody molecules had good stability.

TABLE 6-18
Determination parameters for bispecific antibody molecules in UNcle

| | PR003334 | PR003335 | PR003338 |
|---|---|---|---|
| Tm (° C.) | 60.32 | 65.59 | 62.17 |
| Tagg (° C.) at 266 nm | 52.00 | 50.39 | 54.14 |
| Tagg (° C.) at 473 nm | 1 | — | — |
| Initial SLS at 266 nm (counts × 104) | 0.26 | 0.22 | 0.20 |
| Max SLS at 266 nm (counts × 104) | 1.00 | 0.40 | 0.34 |
| Initial SLS at 473 nm (counts) | <0 | <0 | <0 |
| Max SLS at 473 nm (counts) | <0 | <0 | <0 |
| Initial diameter (nm) (25° C.) | 16.22 | 16.38 | 11.74 |
| Final diameter (nm) (95° C.) | 23.85 | 17.51 | 16.52 |
| Initial PDI | 0.267 | 0.229 | 0.043 |
| Final PDI | 0.089 | 0.194 | 0.185 |

### Example 6.11. Summary

[0713] In this example, B7H4×4-1BB bispecific antibody molecules of a variety of structures are constructed using the antigen-binding domain Fab of the anti-B7H4 IgG antibody and the antigen-binding domain VH of the anti-4-1BB HCAb antibody. This shows the flexibility of constructing the molecular structure of bispecific antibodies based on HCAbs, and the T cell function-activating activity is regulated through different structure types, relative positions, binding valences and other parameters.

[0714] The activation of T cells by Urelumab is not target-specific, which is one of the causes for its clinical toxic and side effects. However, the T cell activation effect of B7H4×4-1BB bispecific antibodies is specifically dependent on the expression of B7H4. In the presence of cells highly expressing B7H4, the bispecific antibodies are able to specifically activate T cells; whereas in the absence of B7H4 expression, the bispecific antibodies are unable to activate T cells. Therefore, the B7H4×4-1BB bispecific antibodies have better safety than 4-1BB monoclonal antibodies such as Urelumab.

[0715] In another aspect, the B7H4×4-1BB bispecific antibodies are able to mediate the crosslinking and trimerization of 4-1BB in the presence of B7H4 to transmit T cell activation signals, and their T cell activation ability is even better than that of Urelumab. In the Fab-HCAb and IgG-VH tetravalent symmetric structures, VH of the 4-1BB end is bivalent, and its T cell activation ability is slightly superior to that of Urelumab; in the IgG-VH-VH hexavalent symmetric structures, VH of the 4-1BB end is multivalent, and its T cell activation ability is significantly enhanced and is significantly superior to that of Urelumab.

[0716] In conclusion, the B7H4×4-1BB bispecific antibody molecules with good safety, outstanding functional activity and good molecular stability are constructed in this example.

### Example 7. BCMA×CD3 Bispecific Antibodies

### Example 7.1. Background

[0717] BCMA (B-cell maturation antigen, TNFRSF17, CD269) is a transmembrane protein belonging to the TNF receptor superfamily, and is involved in the maturation, growth and survival of B cells. BCMA has two main ligands: the high-affinity ligand APRIL (proliferation-inducing ligand) and the low-affinity ligand BAFF (B-cell activating factor). BCMA is a highly differentiated plasma cell-selective protein whose expression is restricted to the B cell lineage and is found predominantly on plasma cells and plasmablasts, and to some extent on memory B cells, but not on peripheral B cells. BCMA is expressed in malignant plasma cells of multiple myeloma (MM) patients and supports the growth and survival of multiple myeloma cells. Multiple myeloma is the second most common hematologic malignancy following non-Hodgkin's lymphoma, accounting for about 13% of hematological malignant tumors. As an emerging target for multiple myeloma, BCMA antibodies can act on MM cells through a variety of mechanisms.

[0718] Currently, the antibodies against BCMA with the fastest development in the clinical stage include CA8-J6M0 hIgG1 (hereinafter also referred to as positive control 1, and numbered PR000274 in the examples) from GlaxoSmithKline (GSK) Plcand an antibody-drug conjugate prepared on the basis of CA8-J6M0, belantamab mafodotin (CA8-J6M0-mcMMAF, GSK2857916). GSK2857916 has been used in multiple clinical trials to treat patients with different types of MM. Data from a small clinical study showed that objective response rate (ORR) reached 60% and median progression-free survival (PFS) was 12 months in 35 patients with relapsed or refractory MM who were over-pretreated (most patients had failed at least 5 therapies). In terms of safety, the most common side effects include corneal events, thrombocytopenia and anemia, which are all associated with cytotoxic agents conjugated to ADCs.

[0719] Currently, bispecific antibodies under clinical development include AMG-420 from Amgen, REGN-5458 from Regeneron, CC-93269 from Celgene, JNJ-64007957 from Johnson, and TNB383B from Abbvie. However, those bispecific antibodies also have problems such as short half-life and cytokine release syndrome (CRS). The bispecific antibody TNB383B was subjected to the clinical phase I in 2019 for MM, which is characterized by low cytokine release levels. However, TNB383B bind to neither BCMA nor CD3 of cynomolgus monkeys and cannot be evaluated toxicologically in cynomolgus monkeys.

[0720] Therefore, there is an urgent need to develop safer and more effective bispecific antibodies that target both human BCMA and CD3 and can bind to cynomolgus monkey BCMA and CD3.

### Example 7.2. Discovery of Anti-BCMA HCAb Antibodies

[0721] The BCMA antigen can be used to immunize laboratory animals such as mice, rats, rabbits, sheep, and camels, to obtain an antibody molecule specifically binding to BCMA. Typically, the resulting antibody molecules are non-human antibodies. After obtaining non-human antibodies, these molecules need to be humanized by antibody engineering technology to reduce immunogenicity and improve druggability. However, the humanization of antibodies is complex in terms of the technology, and the humanized molecules tend to have reduced affinity for antigens. On the other hand, advances in transgenic technology have made it possible to develop genetically engineered mice that carry a human immunoglobulin immune repertoire and have the endogenous murine immune repertoire deleted. The antibodies produced by the transgenic mice have fully human sequences, so that further humanization is not needed, and the efficiency of developing therapeutic antibodies is greatly improved. The Harbour HCAb mouse (Harbour Antibodies BV, WO2010/109165A2) is a transgenic mice carrying an immune repertoire of human immunoglobulins, capable of producing novel “heavy chain”-only antibodies that are only half the size of conventional IgG antibodies. The antibodies produced have only human antibody “heavy chain” variable domains and mouse Fc constant domains. Due to the absence of light chain, this antibody almost solves the problems of light chain mismatch and heterodimerization, allowing the technical platform to develop products that are difficult to realize by the conventional antibody platform.

### Example 7.2.1. Immunization of Mice with BCMA Antigen

[0722] Harbour HCAb mice were subjected to multiple rounds of immunization with a soluble recombinant human BCMA-ECD-Fc fusion protein. The antigenic protein was mixed with an immunoadjuvant to form an immunogenic reagent, which was then injected subcutaneously via the groin or intraperitoneally. In each round of immunization, each mouse received a total injection dose of 100 μL. In the first round of immunization, each mouse received an immunization with an immunogenic reagent prepared by mixing 50 μg of antigenic protein (recombinant human BCMA-ECD-Fc, ACRO Biosystems, #BC7-H82F0) with complete Freund's adjuvant (Sigma, #F5881) in a 1:1 volume ratio. In each subsequent round of booster immunization, each mouse received an immunization with an immunogenic reagent prepared by mixing 25 μg of antigenic protein with Sigma Adjuvant System adjuvant (Sigma, #S6322). The interval between rounds of booster immunization was at least two weeks. In general, there are no more than five rounds of booster immunizations. The immunization was performed at days 0, 14, 28, 42, 56 and 70; and the antibody titer in serum of mice was measured at days 49 and 77. The last round of booster immunization was performed at a dose of 25 μg of antigenic protein per mouse 5 days before the isolation of HCAb mouse splenic B cells.

### Example 7.2.2. Acquisition of HCAb Monoclonal Antibodies and Antibody Sequences

[0723] When the titer of the BCMA-specific antibody in the serum of mice was detected to reach a certain level, spleen cells of the mice were taken, from which B cells were isolated, and the CD138-positive plasma cells and BCMA antigen-positive B cell populations were sorted using a BD FACSAria™ III cell sorter. RNA was extracted and reversely transcribed into cDNA, and human VH gene was amplified by PCR. The amplified VH gene fragment was constructed into a mammalian cell expression plasmid pCAG vector encoding the sequence of the heavy chain Fc domain of the human IgG1 antibody. Mammalian host cells (such as human embryonic kidney cell HEK293) were transfected with the plasmid for expression, and the expressed HCAb antibody supernatant was screened with recombinant human BCMA-Fc, Avitag recombinant protein (ACRO Biosystems, #BC7-H82F0) through Mirrorball (SPT Labtech, Mirrorball® fluorescence cytometer). The obtained positive monoclonal antibody supernatant was further identified by flow cytometry FACS. The binding ability of the antibody supernatant to cells such as an HEK293T cell line HEK293T/hBCMA (KYinno, KC-0233) highly expressing human BCMA, an HEK293T cell line HEK293T/cyno BCMA (KYinno, KC-0979) highly expressing cynomolgus monkey BCMA, and a cell line NCI-H929 (ATCC, CRL-9068) highly expressing human BCMA was tested by FACS. Four positive monoclonal antibodies were obtained by multiple rounds of screening. The nucleotide sequences encoding the variable domains of the antibody molecules and the corresponding amino acid sequences were obtained through conventional sequencing means. In this example, the sequences of the variable domains of the anti-BCMA monoclonal antibody molecules obtained from immunized Harbour HCAb mice were human antibody sequences.

### Example 7.2.3. Preparation of Fully Human Recombinant Anti-BCMA Antibodies

[0724] Purified recombinant anti-BCMA heavy chain antibodies were prepared according to the method described in Example 2.2 using plasmids encoding HCAb antibodies by conventional recombinant protein expression and purification techniques.

[0725] The sequence numbers (SEQ ID NOs) corresponding to the amino acid sequence of the heavy chain variable domain, the amino acid sequences of the full-length heavy chain, and the amino acid sequences of CDRs defined according to the Chothia scheme of the anti-BCMA HCAb antibodies in this example are listed in Table 7-1. The sequence numbers (SEQ ID NOs) corresponding to the light and heavy chain sequences of the positive control 1, CA8-J6M0 (antibody No. PR000274) are listed in Table 7-2.

TABLE 7-1
Sequence numbers of anti-BCMA HCAb antibodies

| | | Heavy | | | | |
|---|---|---|---|---|---|---|
| Clone No. | Antibody No. | chain | VH | HCDR1 | HCDR2 | HCDR3 |
| 1005P10H8 | PR000940 | 316 | 248 | 15 | 75 | 133 |
| 1005P16A10 | PR000943 | 317 | 249 | 24 | 76 | 134 |
| 1005P36F3 | PR001035 | 318 | 250 | 25 | 77 | 135 |
| 1005P63B7 | PR001046 | 319 | 251 | 26 | 78 | 136 |

TABLE 7-2
Sequence number of a control anti-BCMA antibody

| Antibodies alias | Antibody No. | Heavy chain | Light chain |
|---|---|---|---|
| Positive control 1 | PR000274 | 309 | 354 |

### Example 7.3. Binding of HCAb Antibodies to BCMA

[0726] This example is intended to investigate the binding activity of anti-BCMA HCAb antibodies to human and cynomolgus monkey BCMAs. The binding ability of the recombinant anti-BCMA antibodies to cells such as an HEK293T cell line HEK293T/hBCMA (KYinno, KC-0233) highly expressing human BCMA, an HEK293T cell line HEK293T/cyno BCMA (KYinno, KC-0979) highly expressing cynomolgus monkey BCMA, and a cell line NCI-H929 (ATCC, CRL-9068) highly expressing human BCMA was tested by flow cytometry FACS. Specifically, HEK293T/hBCMA cells and HEK293T/cyno BCMA cells were digested and resuspended in a DMEM complete medium. In addition, NCI-H929 cell suspension was collected. The density of each of the three cells was adjusted to 1×10⁶ cells/mL. The cells were seeded in a 96-well V-bottom plate (Corning, #3894) at 100 μL/well, followed by the addition of test antibodies diluted in a 3-fold gradient at a concentration that was 2 times the final concentration, each at 100 μL/well. The cells were incubated at 4° C. for 1 h away from light. Thereafter, the cells in each well were rinsed twice with 100 μL of pre-cooled PBS, and centrifuged at 500 g at 4° C. for 5 min, and then the supernatant was discarded. Thereafter, a fluorescent secondary antibody (Alexa Fluor 488-conjugated AffiniPure Goat Anti-Human IgG, Fcγ Fragment Specific, Jackson, #109-545-06, diluted in a 1:500 ratio) was added at 100 μL/well, and the plate was incubated at 4° C. for 30 min away from light. The cells in each well were rinsed twice with 100 μL of pre-cooled PBS, and centrifuged at 500 g at 4° C. for 5 min, and then the supernatant was discarded. Finally, the cells in each well were resuspended in 200 μL of pre-cooled PBS. Fluorescence signal values were read using a BD FACS CANTOII flow cytometer or an ACEA NovoCyte flow cytometer, and the data were processed and analyzed using FlowJo v10 (FlowJo, LLC) software. The data were processed and analyzed by plotting using GraphPad Prism 8 software, and binding curves of the antibodies to target cells, EC₅₀ values and other parameters were obtained through four-parameter nonlinear fitting.

[0727] In this example, the anti-BCMA monoclonal antibody PR000274 was used as a positive control 1 molecule.

### Example 7.3.1. Binding to HEK293T/hBCMA Cells Highly Expressing Human BCMA

[0728] As shown in FIG. 44 and Table 7-3, the anti-human BCMA HCAb monoclonal antibodies PR000943, PR001035 and PR001046 were able to bind to HEK293T/hBCMA, and all had superior EC₅₀ in the binding curves to the positive control 1.

TABLE 7-3
Binding to HEK293T/hBCMA

| | | Maximum |
|---|---|---|
| Antibody | EC₅₀ (nM) | MFI |
| PR000943 | 0.1535 | 69991 |
| PR001035 | 0.3356 | 39840 |
| PR001046 | 0.2129 | 63382 |
| Positive | 4.076 | 86498 |
| control 1 | | |

### Example 7.3.2. Binding to NCI-H929 Cells Highly Expressing Human BCMA

[0729] As shown in FIG. 46 and Table 7-4, the anti-human BCMA HCAb monoclonal antibodies PR000940, PR000943, PR001035 and PR001046 were able to bind to NCI-H929, and all had superior EC₅₀ in the binding curves to the positive control 1.

TABLE 7-4
Binding to NCI-H929

| | | Maximum |
|---|---|---|
| Antibody | EC₅₀ (nM) | MFI |
| PR000940 | 1.847 | 90962 |
| PR000943 | 4.8 | 166453 |
| PR001035 | 1.193 | 112747 |
| PR001046 | 1.535 | 132791 |
| Positive | 10.75 | 124959 |
| control 1 | | |

### Example 7.3.3. Binding to HEK293T/Cyno BCMA Cells Highly Expressing Cynomolgus Monkey BCMA

[0730] As shown in FIG. 45 and Table 7-5, the anti-human BCMA HCAb monoclonal antibodies PR000943 and PR001046 were able to bind to HEK293T//cyno BCMA, and both had superior EC₅₀ in the binding curves to the positive control 1. PR001035 had a weaker binding ability to cynomolgus monkey BCMA.

TABLE 7-5
Binding to HEK293T/cyno BCMA

| | | Maximum |
|---|---|---|
| Antibody | EC₅₀ (nM) | MFI |
| PR000943 | 0.3293 | 63990 |
| PR001035 | n.d. | 10848 |
| PR001046 | 0.5641 | 67701 |
| Positive | 4.564 | 116307 |
| control 1 | | |

### Example 7.4. Killing of Target Cells by Internalization of HCAb Antibodies

[0731] This example is intended to investigate the killing of cells expressing human BCMA mediated by internalization of anti-human BCMA HCAb antibodies. Specifically, an HEK293T cell line HEK293T/hBCMA (KYinno, KC-0233) highly expressing human BCMA was digested, and the cells were resuspended in a DMEM complete medium, counted and inoculated to a black-wall and transparent-bottom 96-well plate (Perkin Elmer, #6005225) at 5000 or 10000 cells/well. The recombinant antibody was serially diluted to 9 different concentrations and added, with the final concentration starting at 100 nM. a-hFc-MMAF (Moradec, #AH-102-AF) was added to make a final concentration of 1 μg/mL. The plate was incubated at 37° C., 5% CO₂ for 72 h, and the cells were lysed with a CTG kit (Promega, #G7573). The luminescence was detected using an Enspire™ multi-functional microplate reader (PerkinElmer, Inc.). The data were processed and analyzed by plotting using GraphPad Prism 8 software, and binding curves of the antibodies to target cells, EC₅₀ values, maximum killing rate and other parameters were obtained through four-parameter nonlinear fitting.

[0732] As shown in FIG. 47 and Table 7-6, the anti-human BCMA HCAb antibodies PR000943 and PR001046 had superior internalization ability to the positive control 1 molecule.

TABLE 7-6
Target cell killing mediated by antibody internalization

| | | Maximum |
|---|---|---|
| Antibody | EC₅₀ (nM) | killing rate (% ) |
| PR000943 | 0.4917 | 78.72 |
| PR001046 | 0.5711 | 71.20 |
| Positive | 2.180 | 77.19 |
| control 1 | | |

### Example 7.5. Binding Affinity for BCMA Determined by a BLI Method

[0733] In this example, the binding kinetics between the anti-BCMA antibody and the BCMA antigenic protein were analyzed by the Biolayer Interferometry (BLI) technique using an Octet Red96e molecular interaction analyzer (ForteBio, Octet Red96e). In this example, the BCMA protein was biotinylated human BCMA-Fc, Avitag recombinant protein (ACRO Biosystems, #BC7-H82F0), and the assay buffer was 1× kinetics buffer (diluted from 10×kinetics buffer (ForteBio, #18-1105)).

[0734] When the affinity between the antigen and the antibody (at multiple concentrations) was determined, the rotation speed of sensor was set at 1000 rpm/min. Two columns of SA sensors (8 sensors in each column; with the sensors in the first column referred to as the reference SA sensor and the sensors in the second column referred to as the test SA sensor) were firstly equilibrated in the assay buffer for 10 min. Then, the biotinylated human BCMA-Fc, Avitag recombinant protein was captured by test SA sensors with a capture height of 0.9-1.1 nm, and the reference SA sensors were immersed in the buffer for 30 s. Then, the SA sensors were equilibrated in the assay buffer for 2 min. The two columns of SA sensors were then associated with the anti-BCMA antibody diluted in a gradient (e.g., the antibody concentration may be 6 concentrations obtained by a two-fold gradient dilution from 50 nM, and 0 nM) for 5 min, and then dissociated for 10 min.

[0735] When data analysis was performed using Octet Data Analysis software (Fortebio, version 11.0), the reference signals were subtracted by a double reference mode; the data were fitted by a “1:1 Global fitting” method, and the kinetic parameters of the binding of the antigen to the antibody were calculated to obtain kon (1/Ms) values, kdis (1/s) values and KD (M) values.

[0736] As shown in FIG. 48 and Table 7-7, the anti-human BCMA HCAb antibodies had stronger binding affinity for the human BCMA protein.

TABLE 7-7
Binding affinity of anti-BCMA HCAb antibodies for human
BCMA protein

| Antibody | | | | |
|---|---|---|---|---|
| No. | KD (M) | kon (1/Ms) | kdis (1/s) | Full R\hat{ }2 |
| PR000940 | 1.52E−10 | 4.01E+05 | 6.09E−05 | 0.995 |
| PR000943 | 1.62E−10 | 1.19E+05 | 1.93E−05 | 0.9986 |
| PR001035 | 2.76E−10 | 3.25E+05 | 8.98E−05 | 0.9926 |
| PR001046 | 2.53E−11 | 4.23E+05 | 1.07E−05 | 0.9983 |

### Example 7.6. Optimization of HCAb Antibody Sequences to Improve Binding Affinity for BCMA

[0737] In this example, the binding affinity of the HCAb antibody PR001046 for BCMA was improved by an antibody engineering method.

### Example 7.6.1. Acquisition of Variants of PR001046

[0738] Mutants with improved binding affinity for BCMA were obtained by two rounds of site-directed mutagenesis of the CDR regions of the variable region VH of the HCAb antibody PR001046.

[0739] In the first round, 35 sites in the three CDR regions (specified by the Kabat CDR scheme) of PR001046 VH were scanned site-by-site for amino acids to create single-site saturation mutagenesis libraries for 35 different sites. The 35 saturation mutagenesis libraries were screened by BCMA binding ELISA, positive clones with a signal of 2-fold over PR001046 VH were picked out for sequencing and further tested for their binding ability to BCMA by BCMA (at multiple concentrations obtained by a gradient dilution) combined with ELISA. Several mutation hot sites were preferentially selected.

[0740] In the second round, mutation hot sites preferentially selected in the first round were randomly combined to establish a library containing all mutation combinations. The combination library was then screened. Positive clones were subjected to sequencing and sequence analysis, and further tested for their binding ability to BCMA. Several mutants were selected.

[0741] The variant molecules of PR001046 VH were represented by the corresponding clone numbers, e.g., PR001046-R1-12G7, PR001046-R2-7E7 and the like. The VH regions of the variant molecules were constructed into a prokaryotic expression vector with Flag and His tags, and then the variant molecules were prepared by the conventional recombinant protein expression and purification techniques, with the corresponding sequence numbers listed in Table 7-8. Finally, the binding ability of the recombinant mutant molecules was determined by FACS, BLI and other methods.

TABLE 7-8
Sequence numbers of PR001046-derived variant molecules

| Variant clone | Antibody | Heavy | | | | |
|---|---|---|---|---|---|---|
| No. | No. | chain | VH | HCDR1 | HCDR2 | HCDR3 |
| | PR001046 | 319 | 251 | 26 | 78 | 136 |
| 1046-R1-12G7 | PR004559 | 330 | 265 | 26 | 90 | 136 |
| 1046-R2-10F1 | PR004560 | 331 | 266 | 34 | 78 | 146 |
| 1046-R2-10H1 | PR004561 | 332 | 267 | 35 | 78 | 147 |
| 1046-R2-10H5 | PR004562 | 333 | 268 | 35 | 90 | 147 |
| 1046-R2-1A1 | PR004563 | 334 | 269 | 36 | 90 | 146 |
| 1046-R2-2D4 | PR004564 | 335 | 270 | 35 | 76 | 147 |
| 1046-R2-2G4 | PR004565 | 336 | 271 | 34 | 78 | 148 |
| 1046-R2-4G10 | PR004566 | 337 | 272 | 35 | 76 | 136 |
| 1046-R2-5E1 | PR004567 | 338 | 273 | 35 | 90 | 146 |
| 1046-R2-5H1 | PR004568 | 339 | 274 | 34 | 76 | 136 |
| 1046-R2-5H2 | PR004569 | 340 | 275 | 35 | 76 | 146 |
| 1046-R2-6D6 | PR004570 | 341 | 276 | 34 | 76 | 146 |
| 1046-R2-6F1 | PR004571 | 342 | 277 | 35 | 90 | 148 |
| 1046-R2-7E7 | PR004572 | 343 | 278 | 35 | 90 | 136 |
| 1046-R2-8B1 | PR004573 | 344 | 279 | 35 | 90 | 136 |
| 1046-R2-9E5 | PR004574 | 345 | 280 | 34 | 76 | 146 |

### Example 7.6.2. Analysis of Dissociation Rate Order of Variant Molecules Binding to BCMA Protein by the BLI Method

[0742] The binding ability of PR001046 VH-derived single-domain variant molecules to BCMA was determined by the BLI technique by the method described in Example 7.5. In this example, the supernatant containing PR001046 VH-derived variant molecules was directly used, and the binding kinetics between the variant molecules and biotinylated human BCMA-Fc, Avitag recombinant protein were analyzed using an Octet Red96e molecular interaction analyzer. The variant molecules were ranked by the dissociation rate in the binding kinetics, and those with slower dissociation rate (stronger affinity) were selected. In this example, only the dissociation rate in the binding kinetics of each variant molecule to BCMA was analyzed and its relative value (Kdis Fold) to the original molecule (PR001046 VH) was calculated; a “Kdis Fold” of less than 1 indicates that the variant molecule has a slower dissociation rate than the original molecule.

[0743] In this example, multi-concentration binding kinetics analysis was not used for calculating the antigen-antibody binding affinity, and gradient dilution of the antibody to be analyzed was not needed, therefore, only one SA sensor was needed for each antibody, allowing multiple samples to be analyzed in each analysis cycle, thereby increasing the analysis throughput. By this method, the dissociation rate analysis can be performed on supernatant samples of a large number of variant molecules, and the molecules with superior dissociation rate can be selected.

[0744] As shown in Table 7-9, 16 PR001046 VH-derived variant molecules showed a slower dissociation rate (i.e., stronger affinity for BCMA) than the original molecule.

TABLE 7-9
Dissociation rate Kdis of PR001046-derived variant molecules
binding to BCMA protein

| | Antibody | Conc. | | Kdis | Kdis |
|---|---|---|---|---|---|
| Variant clone | No. | (nM) | Response | (1/s) | fold |
| | PR001046 | 100 | 0.2606 | 6.96E−04 | 1.00 |
| 1046-R1-12G7 | PR004559 | 100 | 0.2614 | 3.79E−04 | 0.54 |
| 1046-R2-10F1 | PR004560 | 100 | 0.5732 | 3.01E−04 | 0.43 |
| 1046-R2-10H1 | PR004561 | 100 | 0.2694 | 3.00E−04 | 0.43 |
| 1046-R2-10H5 | PR004562 | 100 | 0.5352 | 2.17E−04 | 0.31 |
| 1046-R2-1A1 | PR004563 | 100 | 0.4933 | 2.59E−04 | 0.37 |
| 1046-R2-2D4 | PR004564 | 100 | 0.5701 | 2.28E−04 | 0.33 |
| 1046-R2-2G4 | PR004565 | 100 | 0.5572 | 2.36E−04 | 0.34 |
| 1046-R2-4G10 | PR004566 | 100 | 0.4245 | 2.86E−04 | 0.41 |
| 1046-R2-5E1 | PR004567 | 100 | 0.5781 | 2.01E−04 | 0.29 |
| 1046-R2-5H1 | PR004568 | 100 | 0.7325 | 2.30E−04 | 0.33 |
| 1046-R2-5H2 | PR004569 | 100 | 0.7303 | 2.54E−04 | 0.36 |
| 1046-R2-6D6 | PR004570 | 100 | 0.4373 | 2.34E−04 | 0.34 |
| 1046-R2-6F1 | PR004571 | 100 | 0.7035 | 2.19E−04 | 0.31 |
| 1046-R2-7E7 | PR004572 | 100 | 0.2896 | 2.36E−04 | 0.34 |
| 1046-R2-8B1 | PR004573 | 100 | 0.2680 | 2.82E−04 | 0.41 |
| 1046-R2-9E5 | PR004574 | 100 | 0.2901 | 3.14E−04 | 0.45 |

### Example 7.6.3. Binding of Variant Molecules to NCI-H929 Cells Highly Expressing Human BCMA

[0745] The binding ability of PR001046 VH-derived single-domain variant molecules to NCI-H929 cells highly expressing human BCMA was determined by the method described in Example 7.3. It is specifically noted that the recombinant variant molecules are VH single-domain antibody molecules with a Flag tag, and a fluorescent secondary antibody against the tag is required in the FACS assay.

[0746] As shown in FIG. 49 and Table 7-10, 16 PR001046 VH-derived single-domain variant molecules were able to better bind to NCI-H929 cells, with superior binding ability to the original molecule.

TABLE 7-10
Binding to NCI-H929

| Antibody | | EC₅₀ | Maximum |
|---|---|---|---|
| No. | Variant clone | (nM) | MFI |
| PR001046 | | n.d. | 764 |
| PR004559 | 1046-R1-12G7 | 22.35 | 1189 |
| PR004560 | 1046-R2-10F1 | 3.75 | 1305 |
| PR004561 | 1046-R2-10H1 | 4.38 | 1242 |
| PR004562 | 1046-R2-10H5 | 1.24 | 1560 |
| PR004563 | 1046-R2-1A1 | 7.96 | 1260 |
| PR004564 | 1046-R2-2D4 | 1.34 | 1530 |
| PR004565 | 1046-R2-2G4 | 2.42 | 1428 |
| PR004566 | 1046-R2-4G10 | 3.17 | 1399 |
| PR004567 | 1046-R2-5E1 | 1.72 | 1436 |
| PR004568 | 1046-R2-5H1 | 2.85 | 1444 |
| PR004569 | 1046-R2-5H2 | 5.87 | 1416 |
| PR004570 | 1046-R2-6D6 | 2.15 | 1355 |
| PR004571 | 1046-R2-6F1 | 2.86 | 1382 |
| PR004572 | 1046-R2-7E7 | 0.54 | 1496 |
| PR004573 | 1046-R2-8B1 | 1.72 | 1232 |
| PR004574 | 1046-R2-9E5 | 2.90 | 1299 |

### Example 7.7. Discovery of Anti-CD3 IgG Antibodies

[0747] The anti-CD3 antibody is an important component in the construction of T-Cell engager bispecific antibodies. In this example, the discovery and preparation of anti-CD3 antibodies by different methods were introduced.

### Example 7.7.1. Discovery of Fully Human CD3 Antibodies

[0748] The Harbour H2L2 mouse (Harbour Antibodies BV) is a transgenic mouse carrying an immune repertoire of human immunoglobulins that produces antibodies with intact human antibody variable domains and rat constant domains. Harbour H2L2 mice were subjected to multiple rounds of immunization with a CD3 antigen. The antigen may be a recombinant human CD3 fusion protein, or a short peptide containing the first 27 amino acid residues at the N terminus of human CD3E, or a human T cell. When the titer of the CD3-specific antibody in the serum of mice was detected to reach a certain level, spleen cells of the mice were taken, from which B cells were isolated. Then, RNA was extracted and cDNA was prepared by RT-PCR. VH and Vκ fragments were amplified by PCR using cDNA as a template, and scFv fragments were prepared by overlap PCR and ligated to a pre-linearized vector pHBM-scFv-ST. The ligation product obtained were transformed into MC1061F′ electroporation competent cells (Lucigen, #60512-1), and a phage library was prepared. Multiple rounds of biopanning were performed with biotinylated antigenic protein, and screening was performed with CHO-K1 cells CHO-K1/hCD3 (Harbour BioMed) highly expressing a human CD3/TCR complex. Positive clones were identified and sequenced. Single-chain variable region fusion proteins (scFv-Fc structure) binding to CD3 obtained by screening by the phage display technique are listed in Table 7-11.

TABLE 7-11
Sequence numbers of fully human anti-human CD3 antibodies

| | Antibody | Polypeptide | | | | | | | | |
|---|---|---|---|---|---|---|---|---|---|---|
| Clone No. | No. | chain | VL | VH | LCDR1 | LCDR2 | LCDR3 | HCDR1 | HCDR2 | HCDR3 |
| M15-C10 | PR002161 | 490 | 294 | 258 | 177 | 191 | 221 | 15 | 84 | 141 |
| M15-H2 | PR002163 | 491 | 295 | 259 | 178 | 197 | 222 | 31 | 85 | 142 |
| M23-F11 | PR002337 | 492 | 296 | 260 | 177 | 191 | 223 | 31 | 86 | 141 |
| M27-B11 | PR002340 | 493 | 297 | 259 | 179 | 198 | 224 | 31 | 85 | 142 |

### Example 7.7.2. Humanization of CD3 Antibodies

[0749] SP34 is a mouse-derived anti-human CD3 antibody and has a function of activating T cells. SP34 is one of the very few antibodies that can bind to multiple primate CD3 antibodies (e.g., human and cynomolgus monkey CD3 antibodies) (see Salmeron, A. et al., J Immunol 147 (1991) 3047-3052; Conrad M. L., et al., Cytometry A 71 (2007) 925-933). The variable region sequences VH and VL are derived from WO2016071004A1.

[0750] In this example, the sequences of the variable regions of the mouse antibody SP34 were humanized by the method of “CDR grafting”. Specifically, the CDRs of the VH of SP34 were grafted to the framework region of the VH of a human antibody, and the CDRs of the VL of SP34 were grafted to the framework region of the VL of a human antibody. The sequences of the framework regions of the VH or VL of a human antibody may be derived from human germline gene sequences or from antibody sequences following V(D)J rearrangement or from consensus sequences of specific VH or VL gene family of a human antibody. In this example, the sequences of the framework regions provided by the human germline gene sequences were used as a humanization template sequence. Specifically, the sequences of the framework regions FR1, FR2, and FR3 were provided by the human germline V gene segment and the sequences of the framework region FR4 was provided by the human germline J gene segment. Finally, humanized variable region (VH or VL) sequences were constructed in the arrangement of (human) FR1-(mouse) CDR1-(human) FR2-(mouse) CDR2-(human) FR3-(mouse) CDR3-(human) FR4.

[0751] In this example, the sequence of the human germline V gene segment IGHV3-73*01 or the human germline V gene segment IGHV3-23*01 in combination with the human germline J gene segment IGHJ1*01 was used as a humanization template to provide the sequences of the framework regions. Moreover, amino acid mutations were introduced in one or more of positions 30, 73, 76, 78, 93 and 94 (according to the Chothia numbering scheme) to obtain a plurality of different VH variant sequences. In this example, the sequence of the human germline V gene segment IGLV7-46*02 in combination with the human germline J gene segment IGLJ2*01 or the sequence of the human germline V gene segment IGKV1-39*01 in combination with the human germline J gene segment IGKJ4*01 was also used as a humanization template to provide the framework region sequences. Moreover, amino acid mutations were introduced in zero or one or more of positions 2, 36, 46, 49, 66, 69, 71 and 87 (according to the Chothia numbering scheme) to obtain a plurality of different VL variant sequences.

[0752] The VH variant sequences and VL variant sequences derived from SP34 were combined in pairs, and recombinant antibodies were prepared by the method described in Example 2.2. Recombinant antibodies and corresponding sequence numbers of SP34 and its derived variants are listed in Table 7-12 and Table 7-13.

TABLE 7-12
SP34-derived humanized recombinant antibodies

| Antibody | | |
|---|---|---|
| No. | Variable region variants | Fc type (mutation) |
| PR000260 | Initial sequences of SP34 | Human IgG1 (LALA) |
| | mouse antibody | |
| PR000511 | VH: VH3231; VL: VL7461 | Human IgG1 (LALA) |
| PR001848 | VH: VH3232; VL: VL7461 | Human IgG1 (AAG) |
| PR003886 | VH: VH3730_N30S; | Human IgG1 (LALA) |
| | VL: VL7461 | |
| PR004616 | VH: VH3233; VL: VL7461 | Human IgG1 (LALA) |
| PR000510 | VH: VH3731; VL: VL7461, | Human IgG1 (LALA) |
| | constructed as scFv | |

(AAG: L234A, L235A, P329G; LALA: L234A, L235A.)

TABLE 7-13
Sequence numbers of sequences and CDR sequences of SP34-derived humanized
recombinant antibodies

| Antibody | Light | Heavy | | | | | | | | |
|---|---|---|---|---|---|---|---|---|---|---|
| No. | chain | chain | VL | VH | LCDR1 | LCDR2 | LCDR3 | HCDR1 | HCDR2 | HCDR3 |
| PR000260 | 352 | 307 | 287 | 239 | 172 | 192 | 216 | 20 | 68 | 128 |
| PR000511 | 357 | 313 | 291 | 245 | 172 | 192 | 216 | 20 | 68 | 128 |
| PR001848 | 357 | 325 | 291 | 257 | 172 | 192 | 216 | 30 | 68 | 128 |
| PR003886 | 357 | 328 | 291 | 263 | 172 | 192 | 216 | 30 | 68 | 128 |
| PR004616 | 357 | 346 | 291 | 281 | 172 | 192 | 216 | 30 | 68 | 128 |
| PR000510 | None | 489 | 291 | 244 | 172 | 192 | 216 | 20 | 68 | 128 |

### Example 7.7.3. Binding of CD3 Antibodies to T Cells

[0753] The binding ability of the CD3 antibodies to human T cells was tested by flow cytometry FACS and the method described in Example 7.10. As shown in FIG. 66, the CD3 antibodies were all able to bind to human T cells; in particular, the fully human CD3 antibodies (PR002161 and PR002163) had similar binding ability to T cells to SP34 chimeric antibody (PR000260) (FIG. 66 (F)); PR000510 and PR000511 (SP34-derived humanized antibodies) had close binding ability to T cells to PR000260 (FIG. 66 (A-B)); PR001848, PR003886, and PR004616 (SP34-derived humanized antibodies) had weakened binding ability to T cells to different degrees after sequence optimization (FIG. 66 (C-E)), to selectively modulate T cell activation function in subsequent design of bispecific antibodies.

### Example 7.8. Construction of Bispecific Antibody Molecules Using Anti-CD3 IgG Antibodies and Anti-BCMA HCAb Antibodies

[0754] In this example, BCMA×CD3 bispecific antibody molecules of a variety of structures were constructed using the antigen-binding domain Fab of the anti-CD3 IgG antibody and the antigen-binding domain VH of the anti-BCMA HCAb antibody. The sequence of the antigen-binding domain Fab of the anti-CD3 antibodies was derived from the sequences described in Table 7-11 and Table 7-13; and the sequence of the antigen-binding domain VH of the anti-BCMA antibodies was derived from the sequences described in Table 7-1 and Table 7-8.

[0755] In this and subsequent examples, the control molecules include: anti-BCMA monoclonal antibody CA8-J6M0 (antibody No. PR000274, sequence source patent U.S. Pat. No. 9,273,141B2) used as the positive control 1 molecule; the BCMA×CD3 bispecific antibody molecule (antibody No. PR002199, sequence source patent WO2019133761A1) used as the positive control 2 molecule; the BCMA×CD3 bispecific antibody (antibody No. PR003106, sequence source patent WO2017134134A1) used as the positive control 3 molecule; and the hIgG1 chimeric antibody derived from the anti-CD3 monoclonal antibody SP34 (antibody No. PR000260, sequence source patent WO2016071004A1). The sequences of the control molecules are shown in Table 7-19.

### Example 7.8.1. Construction of Molecules of Fab-Fc-VH(n) Asymmetric Structures

[0756] BCMA×CD3 bispecific antibody molecules of Fab-Fc-VH(n, n={1,2}) asymmetric structures were designed according to the structures described in Example 1.5 and Example 1.6 using anti-CD3 IgG antibodies and anti-BCMA heavy chain antibodies, with the results summarized in Table 7-14; and molecules of trivalent asymmetric structures containing two different anti-BCMA VH domain sequences were designed according to the structures described in Example 1.6.2, with the results summarized in Table 7-15. The antibody molecule samples were prepared and analyzed according to the method described in Example 2, with the results summarized in Table 7-16.

TABLE 7-14
BCMA×CD3 bispecific antibody molecules of Fab-Fc-VH(n) asymmetric structures

| | Bispecific | CD3 | BCMA | | Number of | | Fc type of Fab | Fc type of |
|---|---|---|---|---|---|---|---|---|
| Structure | antibody | Antibody | antibody | Structure | repetition n | Linker | end | VH_B end |
| No. | molecules | (Fab) | (VH_B) | of Fab end | for VH_B | peptide | (mutation) | (mutation) |
| 11 | PR001987 | PR000511 | PR000940 | Normal | 1 | None | Human IgG1 | Human IgG1 |
| | | | | | | | (knob, AAG) | (hole, AAG) |
| 11 | PR001988 | PR000511 | PR000943 | Normal | 1 | None | Human IgG1 | Human IgG1 |
| | | | | | | | (knob, AAG) | (hole, AAG) |
| 11 | PR001989 | PR000511 | PR001035 | Normal | 1 | None | Human IgG1 | Human IgG1 |
| | | | | | | | (knob, AAG) | (hole, AAG) |
| 1 | PR001990 | PR000511 | PR001046 | Normal | 1 | None | Human IgG1 | Human IgG1 |
| | | | | | | | (knob, AAG) | (hole, AAG) |
| 12 | PR001991 | PR000511 | PR000940 | cross | 1 | None | Human IgG1 | Human IgG1 |
| | | | | VH/VL | | | (knob, AAG) | (hole, AAG) |
| 12 | PR001992 | PR000511 | PR000943 | cross | 1 | None | Human IgG1 | Human IgG1 |
| | | | | VH/VL | | | (knob, AAG) | (hole, AAG) |
| 12 | PR001993 | PR000511 | PR001035 | cross | 1 | None | Human IgG1 | Human IgG1 |
| | | | | VH/VL | | | (knob, AAG) | (hole, AAG) |
| 12 | PR001994 | PR000511 | PR001046 | cross | 1 | None | Human IgG1 | Human IgG1 |
| | | | | VH/VL | | | (knob, AAG) | (hole, AAG) |
| 13 | PR001995 | PR000511 | PR000940 | cross | 1 | None | Human IgG1 | Human IgG1 |
| | | | | Fd/LC | | | (knob, AAG) | (hole, AAG) |
| 13 | PR001996 | PR000511 | PR000943 | cross | 1 | None | Human IgG1 | Human IgG1 |
| | | | | Fd/LC | | | (knob, AAG) | (hole, AAG) |
| 13 | PR001997 | PR000511 | PR001035 | cross | 1 | None | Human IgG1 | Human IgG1 |
| | | | | Fd/LC | | | (knob, AAG) | (hole, AAG) |
| 13 | PR001998 | PR000511 | PR001046 | cross | 1 | None | Human IgG1 | Human IgG1 |
| | | | | Fd/LC | | | (knob, AAG) | (hole, AAG) |
| 14 | PR002299 | PR001848 | PR000940 | Normal | 2 | RT- | Human IgG1 | Human IgG1 |
| | | | | | | GS_5- | (knob, AAG) | (hole, AAG) |
| | | | | | | KL | | |
| 14 | PR002300 | PR001848 | PR000940 | Normal | 2 | RT- | Human IgG1 | Human IgG1 |
| | | | | | | GS_15- | (knob, AAG) | (hole, AAG) |
| | | | | | | KL | | |
| 14 | PR002301 | PR001848 | PR000940 | Normal | 2 | RT- | Human IgG1 | Human IgG1 |
| | | | | | | GS_25- | (knob, AAG) | (hole, AAG) |
| | | | | | | KL | | |
| 14 | PR002308 | PR001848 | PR001046 | Normal | 2 | RT- | Human IgG1 | Human IgG1 |
| | | | | | | GS_5- | (knob, AAG) | (hole, AAG) |
| | | | | | | KL | | |
| 14 | PR002309 | PR001848 | PR001046 | Normal | 2 | RT- | Human IgG1 | Human IgG1 |
| | | | | | | GS_15- | (knob, AAG) | (hole, AAG) |
| | | | | | | KL | | |
| 14 | PR002310 | PR001848 | PR001046 | Normal | 2 | RT- | Human IgG1 | Human IgG1 |
| | | | | | | GS_25- | (knob, AAG) | (hole, AAG) |
| | | | | | | KL | | |
| 11 | PR002929 | PR001848 | PR001046 | Normal | 1 | None | Human IgG1 | Human IgG1 |
| | | | | | | | (knob, LALA) | (hole, LALA) |
| 11 | PR002935 | PR004616 | PR001046 | Normal | 1 | None | Human IgG1 | Human IgG1 |
| | | | | | | | (knob, LALA) | (hole, LALA) |
| 14 | PR002892 | PR001848 | PR001046 | Normal | 2 | GS_5 | Human IgG1 | Human IgG1 |
| | | | | | | | (knob, LALA) | (hole, LALA) |
| 14 | PR002895 | PR001848 | PR001046 | Normal | 2 | GS_15 | Human IgG1 | Human IgG1 |
| | | | | | | | (knob, LALA) | (hole, LALA) |
| 14 | PR002950 | PR004616 | PR001046 | Normal | 2 | GS_5 | Human IgG1 | Human IgG1 |
| | | | | | | | (knob, LALA) | (hole, LALA) |
| 14 | PR002953 | PR004616 | PR001046 | Normal | 2 | GS_15 | Human IgG1 | Human IgG1 |
| | | | | | | | (knob, LALA) | (hole, LALA) |
| 14 | PR002898 | PR001848 | PR001046 | Normal | 2 | GS_2 | Human IgG1 | Human IgG1 |
| | | | | | | | (knob, LALA) | (hole, LALA) |
| 14 | PR002901 | PR001848 | PR001046 | Normal | 2 | GS_4 | Human IgG1 | Human IgG1 |
| | | | | | | | (knob, LALA) | (hole, LALA) |
| 14 | PR002956 | PR004616 | PR001046 | Normal | 2 | GS_2 | Human IgG1 | Human IgG1 |
| | | | | | | | (knob, LALA) | (hole, LALA) |
| 14 | PR002959 | PR004616 | PR001046 | Normal | 2 | GS_4 | Human IgG1 | Human IgG1 |
| | | | | | | | (knob, LALA) | (hole, LALA) |
| 14 | PR003177 | PR003886 | PR001046 | Normal | 2 | GS_5 | Human IgG1 | Human IgG1 |
| | | | | | | | (knob, LALA) | (hole, LALA) |
| 14 | PR003178 | PR003886 | PR001046 | Normal | 2 | GS_15 | Human IgG1 | Human IgG1 |
| | | | | | | | (knob, LALA) | (hole, LALA) |
| 14 | PR003690 | PR003886 | PR001046 | Normal | 2 | GS_15 | Human IgG1 | Human IgG1 |
| | | | | | | | (knob, LALA, | (hole, LALA, |
| | | | | | | | YTE) | YTE) |
| 11 | PR003867 | PR003886 | PR004559 | Normal | 1 | None | Human IgG1 | Human IgG1 |
| | | | | | | | (knob, LALA) | (hole, LALA) |
| 11 | PR003868 | PR003886 | PR004563 | Normal | 1 | None | Human IgG1 | Human IgG1 |
| | | | | | | | (knob, LALA) | (hole, LALA) |
| 11 | PR003869 | PR003886 | PR004564 | Normal | 1 | None | Human IgG1 | Human IgG1 |
| | | | | | | | (knob, LALA) | (hole, LALA) |
| 11 | PR003870 | PR003886 | PR004565 | Normal | 1 | None | Human IgG1 | Human IgG1 |
| | | | | | | | (knob, LALA) | (hole, LALA) |
| 11 | PR003871 | PR003886 | PR004566 | Normal | 1 | None | Human IgG1 | Human IgG1 |
| | | | | | | | (knob, LALA) | (hole, LALA) |
| 11 | PR003872 | PR003886 | PR004567 | Normal | 1 | None | Human IgG1 | Human IgG1 |
| | | | | | | | (knob, LALA) | (hole, LALA) |
| 11 | PR003873 | PR003886 | PR004568 | Normal | 1 | None | Human IgG1 | Human IgG1 |
| | | | | | | | (knob, LALA) | (hole, LALA) |
| 11 | PR003874 | PR003886 | PR004569 | Normal | 1 | None | Human IgG1 | Human IgG1 |
| | | | | | | | (knob, LALA) | (hole, LALA) |
| 11 | PR003875 | PR003886 | PR004570 | Normal | 1 | None | Human IgG1 | Human IgG1 |
| | | | | | | | (knob, LALA) | (hole, LALA) |
| 11 | PR003876 | PR003886 | PR004571 | Normal | 1 | None | Human IgG1 | Human IgG1 |
| | | | | | | | (knob, LALA) | (hole, LALA) |
| 11 | PR003877 | PR003886 | PR004572 | Normal | 1 | None | Human IgG1 | Human IgG1 |
| | | | | | | | (knob, LALA) | (hole, LALA) |
| 11 | PR003878 | PR003886 | PR004573 | Normal | 1 | None | Human IgG1 | Human IgG1 |
| | | | | | | | (knob, LALA) | (hole, LALA) |
| 11 | PR003879 | PR003886 | PR004574 | Normal | 1 | None | Human IgG1 | Human IgG1 |
| | | | | | | | (knob, LALA) | (hole, LALA) |
| 11 | PR003880 | PR003886 | PR004560 | Normal | 1 | None | Human IgG1 | Human IgG1 |
| | | | | | | | (knob, LALA) | (hole, LALA) |
| 11 | PR003881 | PR003886 | PR004561 | Normal | 1 | None | Human IgG1 | Human IgG1 |
| | | | | | | | (knob, LALA) | (hole, LALA) |
| 11 | PR003882 | PR003886 | PR004562 | Normal | 1 | None | Human IgG1 | Human IgG1 |
| | | | | | | | (knob, LALA) | (hole, LALA) |

(mutation code: Knob: S354C, T366W; Hole: Y349C, T366S, L368A, Y407V; AAG: L234A, L235A, P329G; LALA: L234A, L235A; YTE: M252Y, S254T, T256E.)

TABLE 7-15
BCMA×CD3 multispecific antibody molecules of Fab-Fc-VH(2) trivalent
asymmetric structures containing two different anti-BCMA VH domain sequences

| | | | | | | Linker | | |
|---|---|---|---|---|---|---|---|---|
| | | | | | | peptide | | |
| | Bispecific | CD3 | BCMA | BCMA | Structure | (between | Fc type of | Fc type of |
| Structure | antibody | antibody | antibody | antibody | of Fab | VH_B and | Fab end | VH_B end |
| No. | molecules | (Fab) | (VH_C) | (VH_B) | end | VH_C) | (mutation) | (mutation) |
| 15 | PR002313 | PR001848 | PR000940 | PR000943 | Normal | RT-GS_ | Human IgG1 | Human |
| | | | | | | 15-KL | (knob, AAG) | IgG1 |
| | | | | | | | | (hole, AAG) |
| 15 | PR002326 | PR001848 | PR001035 | PR001046 | Normal | RT-GS_ | Human IgG1 | Human |
| | | | | | | 15-KL | (knob, AAG) | IgG1 |
| | | | | | | | | (hole, AAG) |
| 15 | PR002328 | PR001848 | PR001035 | PR001046 | Normal | RT-GS_ | Human IgG1 | Human |
| | | | | | | 25-KL | (knob, AAG) | IgG1 |
| | | | | | | | | (hole, AAG) |
| 15 | PR002332 | PR001848 | PR001046 | PR001035 | Normal | RT-GS_ | Human IgG1 | Human |
| | | | | | | 15-KL | (knob, AAG) | IgG1 |
| | | | | | | | | (hole, AAG) |

(mutation code: Knob: S354C, T366W; Hole: Y349C, T366S, L368A, Y407V; AAG: L234A, L235A, P329G.)

TABLE 7-16
Expression of BCMA × CD3 bispecific antibody molecule proteins of Fab-Fc-
VH(n) asymmetric structures

| | | | | Yield (mg/L) | |
|---|---|---|---|---|---|
| | Bispecific | Expression | Plasmid | after | |
| Structure | antibody | system and | transfection | first | SEC-HPLC |
| No. | molecules | volume | ratio | purification | purity (%) |
| 11 | PR001987 | HEK293-F (40 ml) | 3:2:4 | 61 | 67.88 |
| 11 | PR001988 | HEK293-F (40 ml) | 3:2:4 | 50.7 | 66.65 |
| 11 | PR001989 | HEK293-F (40 ml) | 3:2:4 | 76 | 86.06 |
| 11 | PR001990 | HEK293-F (40 ml) | 3:2:4 | 68.3 | 76.97 |
| 12 | PR001991 | HEK293-F (40 ml) | 3:2:4 | 20.8 | 71.97 |
| 12 | PR001992 | HEK293-F (40 ml) | 3:2:4 | 8.7 | 77.76 |
| 12 | PR001993 | HEK293-F (40 ml) | 3:2:4 | 12.6 | 77.71 |
| 12 | PR001994 | HEK293-F (40 ml) | 3:2:4 | 17.1 | 80.01 |
| 13 | PR001995 | HEK293-F (40 ml) | 3:2:4 | 118.3 | 70.29 |
| 13 | PR001996 | HEK293-F (40 ml) | 3:2:4 | 71.3 | 71.98 |
| 13 | PR001997 | HEK293-F (40 ml) | 3:2:4 | 60.7 | 79.66 |
| 13 | PR001998 | HEK293-F (40 ml) | 3:2:4 | 62 | 39.96 |
| 14 | PR002299 | HEK293-F (40 ml) | 1:1:1 | 20.5 | 46.03 |
| 14 | PR002300 | HEK293-F (40 ml) | 1:1:1 | 31 | 80.48 |
| 14 | PR002301 | HEK293-F (40 ml) | 1:1:1 | 14.4 | 75.42 |
| 14 | PR002308 | HEK293-F (40 ml) | 1:1:1 | 14.7 | 64.92 |
| 14 | PR002309 | HEK293-F (40 ml) | 1:1:1 | 3 | 75.96 |
| 14 | PR002310 | HEK293-F (40 ml) | 1:1:1 | 26.8 | 71.46 |
| 15 | PR002313 | HEK293-F (40 ml) | 1:1:1 | 24.8 | 70.13 |
| 15 | PR002326 | HEK293-F (40 ml) | 1:1:1 | 14 | 84.62 |
| 15 | PR002328 | HEK293-F (40 ml) | 1:1:1 | 27.5 | 79.04 |
| 15 | PR002332 | HEK293-F (40 ml) | 1:1:1 | 23.1 | 82.13 |
| 11 | PR002929 | HEK293-F (40 ml) | 1:1:1 | 13.5 | 94.45 |
| 11 | PR002935 | HEK293-F (40 ml) | 1:1:1 | 4.55 | 94.26 |
| 14 | PR002892 | HEK293-F (40 ml) | 1:1:1 | 6.5 | 76.9 |
| 14 | PR002895 | HEK293-F (40 ml) | 1:1:1 | 16.9 | 84.34 |
| 14 | PR002950 | HEK293-F (40 ml) | 1:1:1 | 3.3 | 75.26 |
| 14 | PR002953 | HEK293-F (40 ml) | 1:1:1 | 7.4 | 89.17 |
| 14 | PR002898 | HEK293-F (40 ml) | 1:1:1 | 5.6 | 81.72 |
| 14 | PR002901 | HEK293-F (40 ml) | 1:1:1 | 5.8 | 83.72 |
| 14 | PR002956 | HEK293-F (40 ml) | 1:1:1 | 5.4 | 78.14 |
| 14 | PR002959 | HEK293-F (40 ml) | 1:1:1 | 6 | 73.9 |
| 14 | PR003177 | Expi-CHO (300 ml) | 1:1:1 | 196 | 83.29 |
| 14 | PR003178 | Expi-CHO (300 ml) | 1:1:1 | 188 | 83.04 |
| 14 | PR003690 | Expi-CHO (300 ml) | 1:1:1 | 200 | 83.81 |
| 11 | PR003867 | HEK293-F (30 ml) | 1:1:1 | 11.46 | 100 |
| 11 | PR003868 | HEK293-F (30 ml) | 1:1:1 | 0.12 | n.d. |
| 11 | PR003869 | HEK293-F (30 ml) | 1:1:1 | 5.63 | 100 |
| 11 | PR003870 | HEK293-F (30 ml) | 1:1:1 | 2.4 | 100 |
| 11 | PR003871 | HEK293-F (30 ml) | 1:1:1 | 6.7 | 100 |
| 11 | PR003872 | HEK293-F (30 ml) | 1:1:1 | 8.92 | 100 |
| 11 | PR003873 | HEK293-F (30 ml) | 1:1:1 | 10.9 | 97.4 |
| 11 | PR003874 | HEK293-F (30 ml) | 1:1:1 | 11.31 | 100 |
| 11 | PR003875 | HEK293-F (30 ml) | 1:1:1 | 26.19 | 100 |
| 11 | PR003876 | HEK293-F (30 ml) | 1:1:1 | 11.88 | 100 |
| 11 | PR003877 | HEK293-F (30 ml) | 1:1:1 | 10.87 | 100 |
| 11 | PR003878 | HEK293-F (30 ml) | 1:1:1 | 12.5 | 96.2 |
| 11 | PR003879 | HEK293-F (30 ml) | 1:1:1 | 24.05 | 100 |
| 11 | PR003880 | HEK293-F (30 ml) | 1:1:1 | 4.49 | 100 |
| 11 | PR003881 | HEK293-F (30 ml) | 1:1:1 | 19.29 | 100 |
| 11 | PR003882 | HEK293-F (30 ml) | 1:1:1 | 11.61 | 100 |

### Example 7.8.2. Construction of Molecules of scFv-Fc-VH(n) Asymmetric Structures

[0757] BCMA×CD3 bispecific antibody molecules of scFv-Fc-VH(n, n={1,2}) asymmetric structures were designed according to the structures described in Example 1.7 and Example 1.8 using anti-CD3 IgG antibodies and anti-BCMA heavy chain antibodies, with the results summarized in Table 7-17. The antibody molecule samples were prepared and analyzed according to the method described in Example 2, with the results summarized in Table 7-18.

TABLE 7-17
BCMA×CD3 bispecific antibody molecules of scFv-Fc-VH(n) asymmetric structures

| | | | | | | Linker | | |
|---|---|---|---|---|---|---|---|---|
| | | | | | | peptide 2 | | |
| | Bispecific | CD3 | BCMA | Structure | Number of | (between | Fc type of | Fc type of |
| Structure | antibody | Antibody | Antibody | of scFv | repetition n | VH_B and | Fab end | VH_B end |
| No. | molecules | (scFv) | (VH) | end | for VH_B | VH_B) | (mutation) | (mutation) |
| 20 | PR001999 | PR000510 | PR000940 | VL-linker | 1 | None | Human IgG1 | Human IgG1 |
| | | | | peptide- | | | (knob, AAG) | (hole, AAG) |
| | | | | VH | | | | |
| 20 | PR002000 | PR000510 | PR000943 | VL-linker | 1 | None | Human IgG1 | Human IgG1 |
| | | | | peptide- | | | (knob, AAG) | (hole, AAG) |
| | | | | VH | | | | |
| 20 | PR002001 | PR000510 | PR001035 | VL-linker | 1 | None | Human IgG1 | Human IgG1 |
| | | | | peptide- | | | (knob, AAG) | (hole, AAG) |
| | | | | VH | | | | |
| 20 | PR002002 | PR000510 | PR001046 | VL-linker | 1 | None | Human IgG1 | Human IgG1 |
| | | | | peptide- | | | (knob, AAG) | (hole, AAG) |
| | | | | VH | | | | |
| 23 | PR002867 | PR002161 | PR001046 | VH-linker | 2 | RT-GS_ | Human IgG1 | Human IgG1 |
| | | | | peptide-VL | | 15-KL | (knob, AAG) | (hole, AAG) |
| 23 | PR002868 | PR002163 | PR001046 | VH-linker | 2 | RT-GS_ | Human IgG1 | Human IgG1 |
| | | | | peptide-VL | | 15-KL | (knob, AAG) | (hole, AAG) |
| 23 | PR002869 | PR002337 | PR001046 | VH-linker | 2 | RT-GS_ | Human IgG1 | Human IgG1 |
| | | | | peptide-VL | | 15-KL | (knob, AAG) | (hole, AAG) |
| 23 | PR002870 | PR002340 | PR001046 | VH-linker | 2 | RT-GS_ | Human IgG1 | Human IgG1 |
| | | | | peptide-VL | | 15-KL | (knob, AAG) | (hole, AAG) |

(mutation code: Knob: S354C, T366W; Hole: Y349C, T366S, L368A, Y407V; AAG: L234A, L235A, P329G.)

TABLE 7-18
Expression of BCMA × CD3 bispecific antibody molecule
proteins of scFv-Fc-VH(n) asymmetric structures

| | Bispecific | Expression | Yield (mg/L) | |
|---|---|---|---|---|
| Structure | antibody | system and | after first | SEC-HPLC |
| No. | molecules | volume | purification | purity (%) |
| 20 | PR001999 | HEK293-F (40 ml) | 18.4 | 74.35 |
| 20 | PR002000 | HEK293-F (40 ml) | 13.6 | 77.84 |
| 20 | PR002001 | HEK293-F (40 ml) | 1.0 | 60.21 |
| 20 | PR002002 | HEK293-F (40 ml) | 14.0 | 79.47 |
| 23 | PR002867 | HEK293-F (40 ml) | 7.4 | 66.68 |
| 23 | PR002868 | HEK293-F (40 ml) | 8.8 | 67.14 |
| 23 | PR002869 | HEK293-F (40 ml) | 17.4 | 83.62 |
| 23 | PR002870 | HEK293-F (40 ml) | 6.5 | 74.84 |

### Example 7.8.3. Sequences of BCMA×CD3 Bispecific Antibody Molecules and Control Molecules

[0758] The sequence numbers corresponding to the sequences of the BCMA×CD3 bispecific antibody molecules constructed in this example and the control molecules are listed in Table 7-20 and Table 7-19. In the bispecific antibody molecules, the sequence of the antigen-binding domain Fab of the anti-CD3 antibodies was derived from the sequences described in Table 7-11 and Table 7-13; and the sequence of the antigen-binding domain VH of the anti-BCMA antibodies was derived from the sequences described in Table 7-1 and Table 7-8. The structure numbers in Table 7-20 correspond to those in Table 1-1 and FIG. 1. The sequence numbers of the corresponding CDR sequences of the different antigen-binding domains of the BCMA×CD3 bispecific or multispecific antibody molecules are listed in Table 7-21.

TABLE 7-19
Sequence numbers of control molecules

| | Antibody | | Polypeptide | Polypeptide | Polypeptide |
|---|---|---|---|---|---|
| Alias | No. | Description | chain 1 | chain 2 | chain 3 |
| Positive | PR000274 | Anti-BCMA monoclonal | 309 | 354 | None |
| control 1 | | antibody CA8-J6M0 | | | |
| Positive | PR002199 | BCMA × CD3 bispecific | 420 | 421 | 422 |
| control 2 | | antibody, | | | |
| | | derived from | | | |
| | | WO2019133761A1 | | | |
| Positive | PR003106 | BCMA × CD3 bispecific | 453 | None | None |
| control 3 | | antibody, | | | |
| | | derived from | | | |
| | | WO2017134134A1 | | | |
| SP34 | PR000260 | Anti-CD3 monoclonal | 352 | 307 | None |
| | | antibody SP34 | | | |

TABLE 7-20
Sequence numbers of BCMA × CD3 bispecific
antibody molecules of this example

| Structure | Antibody | Polypeptide | Polypeptide | Polypeptide |
|---|---|---|---|---|
| No. | No. | chain 1 | chain 2 | chain 3 |
| 11 | PR001987 | 357 | 411 | 410 |
| 11 | PR001988 | 357 | 411 | 412 |
| 11 | PR001989 | 357 | 411 | 413 |
| 11 | PR001990 | 357 | 411 | 414 |
| 11 | PR002929 | 357 | 444 | 449 |
| 11 | PR002935 | 357 | 450 | 449 |
| 11 | PR003867 | 357 | 454 | 465 |
| 11 | PR003868 | 357 | 454 | 466 |
| 11 | PR003869 | 357 | 454 | 467 |
| 11 | PR003870 | 357 | 454 | 468 |
| 11 | PR003871 | 357 | 454 | 469 |
| 11 | PR003872 | 357 | 454 | 470 |
| 11 | PR003873 | 357 | 454 | 471 |
| 11 | PR003874 | 357 | 454 | 472 |
| 11 | PR003875 | 357 | 454 | 473 |
| 11 | PR003876 | 357 | 454 | 474 |
| 11 | PR003877 | 357 | 454 | 475 |
| 11 | PR003878 | 357 | 454 | 476 |
| 11 | PR003879 | 357 | 454 | 477 |
| 11 | PR003880 | 357 | 454 | 478 |
| 11 | PR003881 | 357 | 454 | 479 |
| 11 | PR003882 | 357 | 454 | 480 |
| 12 | PR001991 | 415 | 416 | 410 |
| 12 | PR001992 | 415 | 416 | 412 |
| 12 | PR001993 | 415 | 416 | 413 |
| 12 | PR001994 | 415 | 416 | 414 |
| 13 | PR001995 | 417 | 418 | 410 |
| 13 | PR001996 | 417 | 418 | 412 |
| 13 | PR001997 | 417 | 418 | 413 |
| 13 | PR001998 | 417 | 418 | 414 |
| 14 | PR002299 | 357 | 423 | 424 |
| 14 | PR002300 | 357 | 423 | 425 |
| 14 | PR002301 | 357 | 423 | 426 |
| 14 | PR002308 | 357 | 423 | 427 |
| 14 | PR002309 | 357 | 423 | 428 |
| 14 | PR002310 | 357 | 423 | 429 |
| 14 | PR002892 | 357 | 444 | 445 |
| 14 | PR002895 | 357 | 444 | 446 |
| 14 | PR002898 | 357 | 444 | 447 |
| 14 | PR002901 | 357 | 444 | 448 |
| 14 | PR002950 | 357 | 450 | 445 |
| 14 | PR002953 | 357 | 450 | 446 |
| 14 | PR002956 | 357 | 450 | 447 |
| 14 | PR002959 | 357 | 450 | 448 |
| 14 | PR003177 | 357 | 454 | 445 |
| 14 | PR003178 | 357 | 454 | 446 |
| 14 | PR003690 | 357 | 463 | 464 |
| 15 | PR002313 | 357 | 423 | 430 |
| 15 | PR002326 | 357 | 423 | 431 |
| 15 | PR002328 | 357 | 423 | 432 |
| 15 | PR002332 | 357 | 423 | 433 |
| 20 | PR001999 | 419 | 410 | None |
| 20 | PR002000 | 419 | 412 | None |
| 20 | PR002001 | 419 | 413 | None |
| 20 | PR002002 | 419 | 414 | None |
| 23 | PR002867 | 440 | 428 | None |
| 23 | PR002868 | 441 | 428 | None |
| 23 | PR002869 | 442 | 428 | None |
| 23 | PR002870 | 443 | 428 | None |

TABLE 7-21
Sequence numbers of CDRs of antigen-binding domains of BCMA×CD3
bispecific or multispecific antibody molecules

| | | Antigen- | | | | | | |
|---|---|---|---|---|---|---|---|---|
| Structure | Antibody | binding | | | | | | |
| No. | No. | domain No. | LCDR1 | LCDR2 | LCDR3 | HCDR1 | HCDR2 | HCDR3 |
| 11 | PR001987 | #1 | 172 | 192 | 216 | 20 | 68 | 128 |
| | | #2 | None | None | None | 15 | 75 | 133 |
| 11 | PR001988 | #1 | 172 | 192 | 216 | 20 | 68 | 128 |
| | | #2 | None | None | None | 24 | 76 | 134 |
| 11 | PR001989 | #1 | 172 | 192 | 216 | 20 | 68 | 128 |
| | | #2 | None | None | None | 25 | 77 | 135 |
| 11 | PR001990 | #1 | 172 | 192 | 216 | 20 | 68 | 128 |
| | | #2 | None | None | None | 26 | 78 | 136 |
| 11 | PR002929 | # | 172 | 192 | 216 | 30 | 68 | 128 |
| | | #2 | None | None | None | 26 | 78 | 136 |
| 11 | PR002935 | #1 | 172 | 192 | 216 | 30 | 68 | 128 |
| | | #2 | None | None | None | 26 | 78 | 136 |
| 11 | PR003867 | #1 | 172 | 192 | 216 | 30 | 68 | 128 |
| | | #2 | None | None | None | 26 | 90 | 136 |
| 11 | PR003868 | #1 | 172 | 192 | 216 | 30 | 68 | 128 |
| | | #2 | None | None | None | 36 | 90 | 146 |
| 11 | PR003869 | #1 | 172 | 192 | 216 | 30 | 68 | 128 |
| | | #2 | None | None | None | 35 | 76 | 147 |
| 11 | PR003870 | #1 | 172 | 192 | 216 | 30 | 68 | 128 |
| | | #2 | None | None | None | 34 | 78 | 148 |
| 11 | PR003871 | #1 | 172 | 192 | 216 | 30 | 68 | 128 |
| | | #2 | None | None | None | 35 | 76 | 136 |
| 11 | PR003872 | #1 | 172 | 192 | 216 | 30 | 68 | 128 |
| | | #2 | None | None | None | 35 | 90 | 146 |
| 11 | PR003873 | #1 | 172 | 192 | 216 | 30 | 68 | 128 |
| | | #2 | None | None | None | 34 | 76 | 136 |
| 11 | PR003874 | #1 | 172 | 192 | 216 | 30 | 68 | 128 |
| | | #2 | None | None | None | 35 | 76 | 146 |
| 11 | PR003875 | #1 | 172 | 192 | 216 | 30 | 68 | 128 |
| | | #2 | None | None | None | 34 | 76 | 146 |
| 11 | PR003876 | #1 | 172 | 192 | 216 | 30 | 68 | 128 |
| | | #2 | None | None | None | 35 | 90 | 148 |
| 11 | PR003877 | #1 | 172 | 192 | 216 | 30 | 68 | 128 |
| | | #2 | None | None | None | 35 | 90 | 136 |
| 11 | PR003878 | #1 | 172 | 192 | 216 | 30 | 68 | 128 |
| | | #2 | None | None | None | 35 | 90 | 136 |
| 11 | PR003879 | #1 | 172 | 192 | 216 | 30 | 68 | 128 |
| | | #2 | None | None | None | 34 | 76 | 146 |
| 11 | PR003880 | #1 | 172 | 192 | 216 | 30 | 68 | 128 |
| | | #2 | None | None | None | 34 | 78 | 146 |
| 11 | PR003881 | #1 | 172 | 192 | 216 | 30 | 68 | 128 |
| | | #2 | None | None | None | 35 | 78 | 147 |
| 11 | PR003882 | #1 | 172 | 192 | 216 | 30 | 68 | 128 |
| | | #2 | None | None | None | 35 | 90 | 147 |
| 12 | PR001991 | #1 | 172 | 192 | 216 | 20 | 68 | 128 |
| | | #2 | None | None | None | 15 | 75 | 133 |
| 12 | PR001992 | #1 | 172 | 192 | 216 | 20 | 68 | 128 |
| | | #2 | None | None | None | 24 | 76 | 134 |
| 12 | PR001993 | #1 | 172 | 192 | 216 | 20 | 68 | 128 |
| | | #2 | None | None | None | 25 | 77 | 135 |
| 12 | PR001994 | #1 | 172 | 192 | 216 | 20 | 68 | 128 |
| | | #2 | None | None | None | 26 | 78 | 136 |
| 13 | PR001995 | #1 | 172 | 192 | 216 | 20 | 68 | 128 |
| | | #2 | None | None | None | 15 | 75 | 133 |
| 13 | PR001996 | #1 | 172 | 192 | 216 | 20 | 68 | 128 |
| | | #2 | None | None | None | 24 | 76 | 134 |
| 13 | PR001997 | #1 | 172 | 192 | 216 | 20 | 68 | 128 |
| | | #2 | None | None | None | 25 | 77 | 135 |
| 13 | PR001998 | #1 | 172 | 192 | 216 | 20 | 68 | 128 |
| | | #2 | None | None | None | 26 | 78 | 136 |
| 14 | PR002299, | #1 | 172 | 192 | 216 | 30 | 68 | 128 |
| | PR002300, | #2 | None | None | None | 15 | 75 | 133 |
| | PR002301 | | | | | | | |
| 14 | PR002308, | #1 | 172 | 192 | 216 | 30 | 68 | 128 |
| | PR002309, | #2 | None | None | None | 26 | 78 | 136 |
| | PR002310, | | | | | | | |
| | PR002892, | | | | | | | |
| | PR002895, | | | | | | | |
| | PR002898, | | | | | | | |
| | PR002901 | | | | | | | |
| 14 | PR002950, | #1 | 172 | 192 | 216 | 30 | 68 | 128 |
| | PR002953, | #2 | None | None | None | 26 | 78 | 136 |
| | PR002956, | | | | | | | |
| | PR002959 | | | | | | | |
| 14 | PR003177, | #1 | 172 | 192 | 216 | 30 | 68 | 128 |
| | PR003178, | #2 | None | None | None | 26 | 78 | 136 |
| | PR003690 | | | | | | | |
| 15 | PR002313 | #1 | 172 | 192 | 216 | 30 | 68 | 128 |
| | | #2 | None | None | None | 15 | 15 | 133 |
| | | #3 | None | None | None | 24 | 76 | 134 |
| 15 | PR002326, | #1 | 172 | 192 | 216 | 30 | 68 | 128 |
| | PR002328, | #2 | None | None | None | 25 | 77 | 135 |
| | PR002332 | #3 | None | None | None | 26 | 78 | 136 |
| 20 | PR001999 | #1 | 172 | 192 | 216 | 20 | 68 | 128 |
| | | #2 | None | None | None | 15 | 75 | 133 |
| 20 | PR002000 | #1 | 172 | 192 | 216 | 20 | 68 | 128 |
| | | #2 | None | None | None | 24 | 76 | 134 |
| 20 | PR002001 | #1 | 172 | 192 | 216 | 20 | 68 | 128 |
| | | #2 | None | None | None | 25 | 77 | 135 |
| 20 | PR002002 | #1 | 172 | 192 | 216 | 20 | 68 | 128 |
| | | #2 | None | None | None | 26 | 78 | 136 |
| 23 | PR002867 | #1 | 177 | 191 | 221 | 15 | 84 | 141 |
| | | #2 | None | None | None | 26 | 78 | 136 |
| 23 | PR002868 | #1 | 178 | 197 | 222 | 31 | 85 | 142 |
| | | #2 | None | None | None | 26 | 78 | 136 |
| 23 | PR002869 | #1 | 177 | 191 | 223 | 31 | 86 | 141 |
| | | #2 | None | None | None | 26 | 78 | 136 |
| 23 | PR002870 | #1 | 179 | 198 | 224 | 31 | 85 | 142 |
| | | #2 | None | None | None | 26 | 78 | 136 |

### Example 7.9. Binding of Bispecific Antibody Molecules to BCMA

[0759] This example is intended to investigate the binding ability of the BCMA×CD3 bispecific antibodies to BCMA.

[0760] The binding ability of the bispecific antibody molecules to cells such as an HEK293T cell line HEK293T/hBCMA (KYinno, KC-0233) highly expressing human BCMA, an HEK293T cell line HEK293T/cyno BCMA (KYinno, KC-0979) highly expressing cynomolgus monkey BCMA, and a cell line NCI-H929 (ATCC, CRL-9068) highly expressing human BCMA was tested according to the method described in Example 7.3 by flow cytometry FACS.

[0761] In this example, the anti-BCMA monoclonal antibody PR000274 was used as a positive control 1 molecule. The BCMA×CD3 bispecific antibody molecule PR002199 constructed using the sequences in the patent WO2019133761A1 was used as the positive control 2 molecule. The BCMA×CD3 bispecific antibody molecule PR003106 constructed using the sequences in the patent WO2017134134A1 was used as the positive control 3 molecule.

### Example 7.9.1. Binding to HEK293T/hBCMA Cells Highly Expressing Human BCMA

[0762] As shown in FIG. 50 and Table 7-22, the bispecific antibody molecules were both able to bind to human BCMA, and the bispecific antibody molecule of Fab-Fc-VH(2) asymmetric structures containing two BCMA-binding domains formed in tandem had stronger binding ability to BCMA than the bispecific antibody molecule of Fab-Fc-VH asymmetric structures containing only one BCMA-binding domain.

TABLE 7-22
Binding to HEK293T/hBCMA

| | | Maximum | | | Maximum | | | Maximum |
|---|---|---|---|---|---|---|---|---|
| Antibody | EC₅₀ (nM) | MFI | Antibody | EC₅₀ (nM) | MFI | Antibody | EC₅₀ (nM) | MFI |
| PR001990 | n.d. | 13368 | PR002309 | 0.3555 | 14957 | PR002309 | 0.2586 | 100051 |
| PR002929 | 9.017 | 17606 | PR002892 | 0.7675 | 15526 | PR002895 | 0.1832 | 93152 |
| PR002935 | 14.82 | 23928 | PR002895 | 0.3851 | 14041 | PR002953 | 0.2261 | 91617 |
| | | | PR002950 | n.d. | 22111 | PR003178 | 0.1878 | 99267 |
| | | | PR002953 | n.d. | 25243 | Positive | 0.6024 | 117412 |
| | | | | | | control 2 | | |
| | | | PR002898 | 0.791 | 12631 | | | |
| | | | PR002901 | 0.6536 | 14732 | | | |
| | | | PR002956 | n.d. | 17620 | | | |
| | | | PR002959 | n.d. | 23931 | | | |
| | | | Positive | 1.13 | 17043 | | | |
| | | | control 2 | | | | | |

| | | |
|---|---|---|
| Experiment 1 | Experiment 2 | Experiment 3 |

### Example 7.9.2. Binding to NCI-H929 Tumor Cells Highly Expressing Human BCMA

[0763] As shown in FIG. 52 and Table 7-23, the bispecific antibody molecules were all able to bind to human BCMA. Overall, the bispecific antibody molecules with only one BCMA-binding domain (e.g., in the Fab-Fc-VH structure and the scFv-Fc-VH structure) had weaker binding ability to BCMA than the molecules with a bivalent BCMA-binding domain (e.g., IgG monoclonal antibody, or bispecific antibody molecules of Fab-Fc-VH(2) asymmetric structures). As shown in FIG. 52 (E), a series of bispecific antibody molecules of Fab-Fc-VH structures (PR003867, PR003882) were constructed based on PR001046-derived HCAb variants with improved affinity, and had stronger binding ability to BCMA than PR002929 (with a Fab-Fc-VH structure constructed with PR001046 HCAb). The bispecific antibody molecules of Fab-Fc-VH(2) asymmetric structures had superior binding ability to BCMA to positive controls 1 and 3.

TABLE 7-23
Binding to NCI-H929

| | | Maximum | | | Maximum | | | Maximum |
|---|---|---|---|---|---|---|---|---|
| Antibody | EC₅₀ (nM) | MFI | Antibody | EC₅₀ (nM) | MFI | Antibody | EC₅₀ (nM) | MFI |
| PR001990 | n.d. | 1837 | PR001991 | n.d. | 1979 | PR002929 | 50.2 | 6420 |
| PR002929 | n.d. | 3194 | PR001992 | n.d. | 3208 | PR003867 | 4.6 | 8594 |
| PR002935 | n.d. | 3836 | PR001993 | n.d. | 1290 | PR003868 | 7.3 | 17363 |
| | | | PR001994 | n.d. | 3434 | PR003869 | 1.7 | 12479 |
| | | | PR001995 | n.d. | 2593 | PR003870 | 3.3 | 10638 |
| | | | PR001996 | n.d. | 3325 | PR003871 | 2 | 10580 |
| | | | PR001997 | n.d. | 1456 | PR003872 | 1.1 | 11274 |
| | | | PR001998 | n.d. | 3259 | PR003873 | 1.3 | 10202 |
| | | | PR001999 | n.d. | 3476 | PR003874 | 1.5 | 10978 |
| | | | PR002000 | n.d. | 4643 | PR003875 | 1.2 | 9845 |
| | | | PR002002 | n.d. | 4500 | PR003876 | 2.3 | 10901 |
| | | | Positive | n.d. | 6160 | PR003877 | 1.7 | 11127 |
| | | | control 1 | | | | | |
| | | | | | | PR003878 | 1.5 | 9241 |
| | | | | | | PR003879 | 2.1 | 10842 |
| | | | | | | PR003880 | 5.6 | 8662 |
| | | | | | | PR003881 | 2.6 | 10278 |
| | | | | | | PR003882 | 1.8 | 11109 |
| PR002299 | n.d. | 32843 | PR002309 | 1.731 | 4712 | PR003178 | 1.232 | 15578 |
| PR002300 | n.d. | 44154 | PR002892 | 4.272 | 4360 | PR002895 | 1.53 | 15431 |
| PR002301 | n.d. | 52958 | PR002895 | 2.006 | 4201 | PR002953 | 1.339 | 15078 |
| PR002308 | 1.816 | 63931 | PR002950 | 4.114 | 4188 | Positive | n.d. | 25908 |
| | | | | | | control 3 | | |
| PR002309 | 1.336 | 68011 | PR002953 | 2.908 | 4303 | | | |
| PR002310 | 2.094 | 61263 | PR002898 | 1.941 | 3728 | | | |
| PR002313 | 17.15 | 78009 | PR002901 | 2.319 | 4182 | | | |
| PR002326 | 3.537 | 59994 | PR002956 | 3.948 | 3566 | | | |
| PR002328 | 6.893 | 58892 | PR002959 | 4.3 | 4212 | | | |
| PR002332 | 9.004 | 84510 | | | | | | |
| Positive | 4.294 | 88218 | | | | | | |
| control 2 | | | | | | | | |
| Positive | 28.94 | 109555 | | | | | | |
| control 1 | | | | | | | | |

### Example 7.9.3. Binding to HEK293T/Cyno BCMA Cells Highly Expressing Cynomolgus Monkey BCMA

[0764] As shown in FIG. 51 and Table 7-24, the bispecific antibody molecules were all able to bind to cynomolgus monkey BCMA, whereas the positive control 2 bispecific antibody molecule was unable to bind to cynomolgus monkey BCMA. Moreover, the bispecific antibody molecules of Fab-Fc-VH(2) structures containing two VH domains of PR001046 in tandem had stronger binding ability to cynomolgus monkey BCMA.

TABLE 7-24
Binding to HEK293T/cyno BCMA

| | Maximum | | Maximum | | Maximum |
|---|---|---|---|---|---|
| Antibody | MFI | Antibody | MFI | Antibody | MFI |
| PR001990 | 9167 | PR002309 | 16248 | PR002301 | 12958 |
| PR002929 | 13791 | PR002892 | 14983 | PR002308 | 39286 |
| PR002935 | 21994 | PR002895 | 13799 | PR002309 | 41640 |
| | | PR002950 | 26570 | PR002310 | 42045 |
| | | PR002953 | 35655 | | |
| | | PR002898 | 8188 | | |
| | | PR002901 | 11033 | | |
| | | PR002956 | 16151 | | |
| | | PR002959 | 30644 | | |
| | | Positive | 926 | | |
| | | control 2 | | | |
| PR002313 | 7608 | PR002309 | 128176 | | |
| PR002326 | 6444 | PR002895 | 103462 | | |
| PR002328 | 7807 | PR002953 | 109345 | | |
| | | PR003178 | 115022 | | |
| | | Positive | 4698 | | |
| | | control 2 | | | |

### Example 7.10. Binding of Bispecific Antibody Molecules to T Cells

[0765] This example is intended to investigate the binding ability of the BCMA×CD3 bispecific antibodies to T cells.

[0766] The binding ability of the antibody molecules to human or cynomolgus monkey T cells was tested by flow cytometry FACS. Specifically, T cells were isolated from human or cynomolgus monkey PBMC cells using a T cell isolation kit (Meltenyi, #130-096-535). The T cell density was adjusted to 1×10⁶ cells/mL. The cells were seeded in a 96-well plate (Corning, #3894) at 100 μL/well, followed by the addition of test antibodies diluted in a 3-fold gradient at a concentration that was 2 times the final concentration, each at 100 μL/well. The cells were incubated at 4° C. for 1 h away from light. Then, the cells in each well were rinsed twice with 100 μL of pre-cooled PBS, and centrifuged at 500 g at 4° C. for 5 min, and then the supernatant was discarded. Thereafter, a fluorescent secondary antibody (Alexa Fluor 488-conjugated AffiniPure Goat Anti-Human IgG, Fcγ Fragment Specific, Jackson, #109-545-06, diluted in a 1:500 ratio) was added at 100 μL/well, and the plate was incubated at 4° C. for 30 min away from light. The cells in each well were rinsed twice with 100 μL of pre-cooled PBS, and centrifuged at 500 g at 4° C. for 5 min, and then the supernatant was discarded. Finally, the cells in each well were resuspended in 200 μL of pre-cooled PBS. Fluorescence signal values were read using a BD FACS CANTOII flow cytometer or an ACEA NovoCyte flow cytometer, and the data were processed and analyzed using FlowJo v10 (FlowJo, LLC) software. The data were processed and analyzed by plotting using GraphPad Prism 8 software, and binding curves of the antibodies to target cells, EC₅₀ values and other parameters were obtained through four-parameter nonlinear fitting.

[0767] In this example, the anti-CD3 monoclonal antibody SP34 (antibody No. PR000260) was used as a positive control; and the positive control 2 bispecific antibody molecule (antibody No. PR002199) was used as another control molecule.

### Example 7.10.1. Binding to Human T Cells

[0768] As shown in FIG. 53 and Table 7-25, the bispecific antibody molecules were all able to bind to human T cells. The positive control molecule SP34 was of a bivalent IgG structure, and had very strong binding ability to T cells. The positive control 2 bispecific antibody molecule had a very weak binding ability to T cells. The CD3 end of the bispecific antibody molecule was of a monovalent Fab structure, and the Fab sequence of which was a variant sequence derived from the anti-CD3 monoclonal antibody SP34. The binding ability of those variant sequences to T cells was reduced to different degrees through sequence design and mutation, so that the T cell activation ability of the CD3 end was reduced, and the side effects caused by excessive release of cytokines were reduced. The CD3 ends of different bispecific antibody molecules have different structures or variant sequences, and also differ in their binding ability to T cells. The different requirements for balancing activity and safety in the clinic lead to different requirements for the binding ability of T cells.

TABLE 7-25
Binding to human T cells

| | Maximum | | Maximum | | Maximum |
|---|---|---|---|---|---|
| Antibody | MFI | Antibody | MFI | Antibody | MFI |
| PR001987 | 5159 | PR001995 | 2917 | PR001990 | 350167 |
| PR001988 | 5796 | PR001996 | 3439 | PR002929 | 283045 |
| PR001989 | 6680 | PR001997 | 4458 | PR002309 | 316716 |
| PR001990 | 5453 | PR001998 | 3318 | PR002895 | 321582 |
| PR001991 | 3244 | PR001999 | 1166 | PR003178 | 23926 |
| PR001992 | 2240 | PR002000 | 1731 | PR002953 | 16961 |
| PR001993 | 4785 | PR002002 | 1118 | Positive | 6847 |
| | | | | control 2 | |
| PR001994 | 3381 | SP34 | 6026 | hIgG1 iso | 2995 |
| SP34 | 7162 | hIgG1 iso | 12 | | |

| | | |
|---|---|---|
| Experiment 1 | Experiment 2 | Experiment 3 |

### Example 7.10.2. Binding to Cynomolgus Monkey T Cells

[0769] As shown in FIG. 54 and Table 7-26, the bispecific antibody molecules of this example were able to bind to cynomolgus monkey T cells because their Fab sequences at CD3 ends were variant sequences derived from the anti-CD3 monoclonal antibody SP34, whereas the positive control 2 bispecific antibody molecule was unable to bind to cynomolgus monkey T cells.

TABLE 7-26
Binding to cynomolgus
monkey T cells

| | Maximum |
|---|---|
| Antibody | MFI |
| PR001990 | 15557 |
| PR002929 | 10128 |
| PR002309 | 11664 |
| PR003178 | 10725 |
| PR002895 | 18601 |
| PR002953 | 9708 |
| PR003177 | 12107 |
| PR002950 | 8827 |
| Positive | 1109 |
| control 2 | |
| hIgG1 iso | 794 |

### Example 7.11. Binding Affinity of Bispecific Antibody Molecules for BCMA Determined by a BLI Method

[0770] In this example, the binding kinetics between the BCMA×CD3 bispecific antibody molecule and the BCMA antigenic protein were analyzed by the method described in Example 7.5 using an Octet Red96e molecular interaction analyzer (ForteBio, Octet Red96e).

[0771] The bispecific antibody molecules were all able to bind to human and cynomolgus monkey BCMAs (Table 7-27 and Table 7-28), whereas the positive control 2 bispecific antibody molecule was unable to bind to human and cynomolgus monkey BCMAs. Moreover, the ratio of the binding affinity (KD) values of the bispecific antibody molecules of this example to human BCMA (ACRO Biosystems, #BC7-H82F0) and to cynomolgus monkey BCMA (ACRO Biosystems, #BCA-C82F4) (Table 7-29) was within 5-fold (0.5-5), indicating that there is a good correlation.

TABLE 7-27
Binding affinity of BCMA × CD3 bispecific antibody molecules
for human BCMA protein

| | | | | | Full |
|---|---|---|---|---|---|
| Antibody | Antigen | KD (M) | kon(1/Ms) | kdis(1/s) | R\hat{ }2 |
| Positive | huBCMA.Fc | 6.55E−10 | 2.06E+05 | 1.35E−04 | 0.9994 |
| control 1 | | | | | |
| PR001046 | huBCMA.Fc | 7.75E−11 | 4.59E+05 | 3.56E−05 | 0.9952 |
| PR001990 | huBCMA.Fc | 1.95E−09 | 3.22E+05 | 6.29E−04 | 0.995 |
| Positive | huBCMA.Fc | 4.52E−11 | 5.45E+05 | 2.46E−05 | 0.9969 |
| control 2 | | | | | |
| PR002309 | huBCMA.Fc | 4.48E−11 | 4.22E+05 | 1.89E−05 | 0.9974 |
| PR002895 | huBCMA.Fc | 1.97E−10 | 4.12E+05 | 8.11E−05 | 0.9974 |
| PR002929 | huBCMA.Fc | 5.95E−09 | 2.49E+05 | 1.48E−03 | 0.9933 |
| PR002953 | huBCMA.Fc | 2.25E−10 | 4.74E+05 | 1.07E−04 | 0.998 |
| PR003178 | huBCMA.Fc | 2.36E−10 | 4.94E+05 | 1.17E−04 | 0.9978 |

TABLE 7-28
Binding affinity of BCMA × CD3 bispecific antibody
molecules for cynomolgus monkey BCMA protein

| | | | | | Full |
|---|---|---|---|---|---|
| Antibody | Antigen | KD (M) | kon(1/Ms) | kdis(1/s) | R\hat{ }2 |
| Positive | cyBCMA.Fc | 3.88E−11 | 2.00E+05 | 7.76E−06 | 0.9456 |
| control 1 | | | | | |
| PR001046 | cyBCMA.Fc | 1.19E−10 | 6.33E+05 | 7.54E−05 | 0.9965 |
| PR001990 | cyBCMA.Fc | 3.35E−09 | 7.46E+05 | 2.50E−03 | 0.9689 |
| Positive | cyBCMA.Fc | \ | | | |
| control 2 | | | | | |
| PR002309 | cyBCMA.Fc | 1.41E−10 | 8.23E+05 | 1.16E−04 | 0.9973 |
| PR002895 | cyBCMA.Fc | 2.72E−10 | 8.90E+05 | 2.42E−04 | 0.9983 |
| PR002929 | cyBCMA.Fc | 6.62E−09 | 8.79E+05 | 5.82E−03 | 0.9437 |
| PR002953 | cyBCMA.Fc | 1.95E−10 | 3.65E+05 | 7.12E−05 | 0.9989 |
| PR003178 | cyBCMA.Fc | 3.19E−10 | 8.22E+05 | 2.62E−04 | 0.9981 |

TABLE 7-29
Ratio of binding affinity values
for BCMA

| | KD ratio |
|---|---|
| | (cy BCMA/hu |
| Antibody | BCMA) |
| Positive control 1 | 0.06 |
| PR001046 | 1.54 |
| PR001990 | 1.72 |
| Positive control 2 | N/A |
| PR002309 | 3.16 |
| PR002895 | 1.38 |
| PR002929 | 1.11 |
| PR002953 | 0.87 |
| PR003178 | 1.35 |

### Example 7.12. Killing Assay on Target Cells by Bispecific Antibody Molecules

[0772] In this example, T cell activation ability and specific target cell killing ability mediated by BCMA×CD3 bispecific antibody molecules were investigated.

### Example 7.12.1. In Vitro Killing Assay on NCI-H929 Cells Highly Expressing BCMA and Release of Cytokines

[0773] In this example, the ability of bispecific antibody molecules to activate T cells, release cytokines and kill tumor cells in the presence of NCI-H929 tumor cells (ATCC, CRL-9068) highly expressing BCMA was investigated. The effector cells may be human peripheral blood mononuclear cells PBMCs or T cells isolated from PBMCs.

[0774] Specifically, the density of effector cells (PBMCs or T cells) was adjusted to 1.1×10⁶ cells/mL and the density of NCI-H929 was adjusted to 0.11×10⁶ cells/mL in a culture medium (RPMI1640 medium containing 5% FBS). The two cell suspensions were each seeded into a 96-well plate (Corning, #3799) at 90 μL cells/well. Then, the test antibodies at different concentrations (gradient dilution to a concentration that was 10 times the final concentration) were added at 20 μL/well, wherein the antibody concentration may be the final concentration of 30 nM, or a total of 3 concentrations obtained by a 20-fold gradient dilution from the highest final concentration of 1 nM, or a total of 10 concentrations obtained by a 4-fold gradient dilution from the highest final concentration of 30 nM. hIgG1 iso (CrownBio, #C0001) was used as an isotype control. The final effector-to-target ratio was 10:1, and two duplicate wells were set for each concentration. The well to which the test antibody was added was called ER (experimental well, containing the test antibody sample and the effector and target cells); meanwhile, different control groups were set in the plate according to the parameter composition in the following formula: ESR (natural release well for effector cell, containing only effector cell and culture medium); TSR (natural release well for target cell, containing only target cell and culture medium); CMB (medium reference well, containing only medium); TMR (maximum release well for target cell, containing only target cell and culture medium); and VCC (volume reference well, containing only medium). The 96 well plate was incubated in a carbon dioxide incubator at 37° C. for 24 h. Then, 10 μL of lysis buffer was added into the TMR and VCC wells, and the plate was incubated for 30 min. After incubation was completed, the supernatant was added into a 96-well plate (Corning, #3599) at 50 μL/well, followed by the addition of a cytotoxicity assay reagent (CytoTox 96® non-radioactive cytotoxicity assay kit, Promega, #G1780) at 50 μL/well. After incubation for 30 min at room temperature, 50 μL of reaction stop buffer was added to stop the reaction. Finally, the absorbance value was read at 490 nM using an Enspire™ multifunctional microplate reader (Perkin Elmer, Inc.), and the target cell killing rate was calculated according to the following calculation formula:

killing rate=((ER−CMB)−(ESR−CMB)−(TSR−CMB))/(TMR−VCC)×100%

[0775] wherein:
[0776] ER=experimental well, sample+ effector cells+target cells
[0777] ESR=natural release well for effector cell, effector cell+culture medium
[0778] TSR=natural release well for target cell, target cell+culture medium
[0779] TMR=maximum release well for target cell, target cell+medium+lysis buffer
[0780] VCC=volume reference well, medium+lysis buffer
[0781] CMB=medium reference well, medium

[0782] In addition to cytotoxicity, cytokine release levels in the cell supernatant can also be determined. Briefly, 50 μL of supernatant was removed for determination of cytokine levels. The concentration of TNF-α in the supernatant was determined using a TNF-α ELISA kit (Thermo, #88-7346-88); the concentration of IL-6 in the supernatant was determined using an IL-6 ELISA kit (Thermo, #88-7066-88); the concentration of IL-2 in the supernatant was determined using an IL-2 ELISA kit (Thermo, #88-7025-88); the concentration of IFN-γ in the supernatant was determined using an IFN-γ ELISA kit (Thermo, #88-7316-88); and the concentration of IL-10 in the supernatant was determined using an IL-10 ELISA kit (Thermo, #88-7106-88). The ELISA assay was performed by referring to the instructions of relevant kit. The data was processed and analyzed by plotting using GraphPad Prism 8 software.

[0783] As shown in FIG. 56, the bispecific antibody molecules of scFv-Fc-VH(1) asymmetric structures (PR002000 and PR002002) were able to effectively kill target cells. The bispecific antibody molecule PR001999 constructed based on the anti-BCMA HCAb monoclonal antibody PR000940 had no killing function on target cells. Those molecules were structurally similar and contained identical sequence of the CD3-binding domain (scFv), with the difference being that the sequences of the BCMA-binding domain (VH) were different. The differences in the binding affinity or epitope of different VHs to the BCMA antigen result in differences in the killing activity of the bispecific antibody molecules against target cells. The anti-BCMA IgG monoclonal antibody positive control 1 molecule also had no killing function.

[0784] As shown in FIG. 55, the bispecific antibody molecules of scFv-Fc-VH(2) asymmetric structures (PR002867, PR002868, PR002869, and PR002870) were able to kill target cells to different degrees. Those molecules were structurally similar and contained two identical BCMA-binding domains (VHs) in tandem, with the only difference being that the sequence of the CD3-binding domain (scFv) was derived from different anti-CD3 monoclonal antibodies. PR002867 and PR002870 had similar target cell killing ability to the positive control 2 bispecific antibody molecule, whereas PR002868 and PR002869 had weaker target cell killing ability.

[0785] As shown in FIG. 57 (A-B), 12 bispecific antibody molecules of Fab-Fc-VH(1) asymmetric structures (PR001987, PR001998) had similar molecular structures but different sequences of the BCMA-binding domain and CD3-binding domain; and thus had different target cell killing ability. Among them, PR001988, PR001990, PR001994, PR001996 and PR001998 had stronger target cell killing ability. As shown in FIG. 57 (C), PR001990 had stronger target cell killing ability than PR001988. As shown in FIG. 57 (D-F), the bispecific antibody molecules of Fab-Fc-VH structures constructed based on PR001046-derived HCAb variants with improved affinity had target cell killing ability.

[0786] As shown in FIG. 58, the bispecific antibody molecules of Fab-Fc-VH(2) asymmetric structures were able to effectively kill target cells. Those molecules all contained two BCMA-binding domains (VHs) in tandem. They had significantly superior target cell killing ability to PR001990 of a Fab-Fc-VH(1) structure and the positive control 2 bispecific antibody molecule. As shown in FIG. 58 (A-B), the bispecific antibody molecules PR002301, PR002308, PR002309, PR002310, PR002313, PR002326 and PR002328 had identical sequences of CD3-binding domain. Among them, the BCMA-binding domains of PR002301, PR002308, PR002309 and PR002310 were formed by two identical VH sequences in tandem; the BCMA-binding domains of PR002313, PR002326 and PR002328 were formed by two different VH sequences in tandem; in particular, the two different VHs used by the BCMA-binding domains of PR002326 and PR002328 may bind to different epitopes of BCMA. As shown in FIG. 58 (C), the BCMA-binding domains of the bispecific antibody molecules PR002892, PR002895, PR002950, PR002953, PR003177 and PR003178 were formed by two identical VH sequences derived from PR001046 connected in tandem via linker peptide sequences of different lengths. However, those bispecific antibody molecules had different sequences of the CD3-binding domains and different binding ability to T cells, and thus exhibited different target cell killing efficiency (EC₅₀. As shown in FIG. 58 (D), the bispecific antibody molecule PR003690 had consistent target cell killing ability with PR003178, because the target-binding domain of PR003690 was not changed, although extra amino acid mutations were introduced into the Fc region of PR003690 to further improve the serum half-life on the basis of PR003178.

[0787] As shown in FIG. 59 and FIG. 60, the target cell killing ability and the release levels of various cytokines of the bispecific antibody molecules PR001990 (Fab-Fc-VH(1) structure, strong CD3 binding), PR002309 (Fab-Fc-VH(2) structure, strong CD3 binding), PR002895 (Fab-Fc-VH(2) structure, strong CD3 binding), PR002953 (Fab-Fc-VH(2) structure, weak CD3 binding) and PR003178 (Fab-Fc-VH(2) structure, moderate CD3 binding) as well as the positive control 2 and positive control 3 were investigated more systematically (Table 7-30 and Table 7-31). Those bispecific antibody molecules were able to achieve similar maximum killing rates, but with different killing efficiency EC₅₀ and different release levels of cytokines induced. PR002309, PR002895, PR002953 and PR003178 had superior target cell killing EC₅₀ to the positive control 2; moreover, PR002895, PR002953 and PR003178 caused lower release levels of various cytokines than the positive control 3. In particular, PR003178 had superior target cell killing ability (EC₅₀ was 10-fold higher) to the positive control 2; PR003178 had comparable killing ability to the positive control 3, but a lower maximum cytokine release than the positive control 3. This indicates that PR003178 can control the release level of cytokines while maintaining effective tumor killing efficiency to reduce the risk of cytokine release syndrome, potentially better balancing efficacy and safety in the clinic and leading to a better therapeutic window.

TABLE 7-30
In vitro killing of NCI-H929 cells by effector cells and
release of cytokines mediated by BCMA × CD3 bispecific
antibody molecules

| | | | | Positive |
|---|---|---|---|---|
| | Antibody | PR001990 | PR002309 | control 2 |
| NCI-H929 | Maximum killing | 61.38 | 69.52 | 61.2 |
| killing | rate % | | | |
| | EC₅₀ (nM) | 0.5901 | 0.007717 | 0.1603 |
| IFN-γ | Maximum (pg/ml) | 1232 | 1950 | 1017 |
| | EC₅₀ (nM) | 1.358 | 0.01945 | 0.483 |
| TNF-α | Maximum (pg/mL) | 1198 | 1298 | 608.1 |
| | EC₅₀ (nM) | 5.486 | 0.0445 | 0.4638 |
| IL-2 | Maximum (pg/mL) | 185.4 | 222 | 21.51 |
| | EC₅₀ (nM) | 5.292 | 0.03746 | 2.272 |
| IL-6 | Maximum (pg/ml) | 272.9 | 208.9 | 245.1 |
| | EC₅₀ (nM) | 8.204 | 0.1945 | 13.13 |
| IL-10 | Maximum (pg/ml) | 776.8 | 1054 | 582.8 |
| | EC₅₀ (nM) | 1.956 | 0.02982 | 0.8611 |

TABLE 7-31
In vitro killing of NCI-H929 cells by effector cells and release of cytokines
mediated by BCMA×CD3 bispecific antibody molecules

| | | | | | Positive | Positive |
|---|---|---|---|---|---|---|
| | Antibody | PR002895 | PR002953 | PR003178 | control 2 | control 3 |
| NCI- | Maximum killing | 57.93 | 57.51 | 56.78 | 62.03 | 61.5 |
| H929 | rate % | | | | | |
| killing | EC₅₀ (nM) | 0.002932 | 0.04699 | 0.01018 | 0.1154 | 0.01919 |
| IFN-γ | Maximum (pg/ml) | 1441 | 639.8 | 1207 | 658.4 | 2247 |
| | EC₅₀ (nM) | 0.02232 | 0.2124 | 0.0595 | 0.2607 | 0.09596 |
| TNF-α | Maximum (pg/ml) | 1282 | 894.2 | 1330 | 1021 | 2506 |
| | EC₅₀ (nM) | 0.008184 | 0.1965 | 0.02814 | 0.2243 | 0.08062 |
| IL-2 | Maximum (pg/ml) | 100.1 | 23.57 | 101.1 | 25.79 | 300.2 |
| | EC₅₀ (nM) | 0.02112 | 0.7954 | 0.1748 | 0.3118 | 0.3374 |
| IL-6 | Maximum (pg/ml) | 118.1 | 68.45 | 89.66 | 71.43 | 128.4 |
| | EC₅₀ (nM) | 0.008391 | 0.1278 | 0.04478 | 0.3411 | 0.1101 |
| IL-10 | Maximum (pg/ml) | 239.6 | 129.2 | 321.5 | 190.5 | 516.9 |
| | EC₅₀ (nM) | 0.01341 | 0.2081 | 0.1044 | 0.335 | 0.1007 |

### Example 7.12.2. Influence of Soluble APRIL and Soluble BAFF on the Target Cell Killing Effect of Bispecific Antibody Molecules

[0788] In this example, the influence of BCMA ligands (APRIL and BAFF) on the target cell killing effect of bispecific antibody molecules was further investigated on the basis of the method described in Example 7.12.1, wherein the concentrations of APRIL and BAFF were about 100 ng/mL in the plasma of multiple myeloma patients (Blood 2004; 103: 3148-3157). Specifically, in the method described in Example 7.12.1, when the test antibodies at different concentrations were added, each of the BCMA ligand proteins were also added at 20 μL/well, so that the final concentrations of the soluble ligand proteins were 100 ng/mL and 10 ng/mL, respectively. The soluble APRIL protein (sAPRIL) was a recombinant human APRIL protein (Novoprotein, #CU89); and the soluble BAFF protein (sBAFF) was a recombinant human BAFF protein (ACRO Biosystems, #BAF-H5248). The effector cells were human PBMCs or T cells and the target cells were NCI-H929. Target cell killing rates were calculated by the method described in Example 7.12.1.

[0789] As shown in FIG. 61 and Table 7-32, soluble APRIL and BAFF have little influence on the target cell killing ability of the bispecific antibody molecules.

TABLE 7-32
Killing of NCI-H929 by BCMA × CD3 bispecific antibody molecules in the
presence of soluble APRILs or BAFFs at various concentrations

| T cell + | | PR001990 + 10 | PR001990 + 100 | PR001990 + 10 | PR001990 + 100 |
|---|---|---|---|---|---|
| NCI-H929 | PR001990 | ng/mL sBAFF | ng/mL sBAFF | ng/mL sAPRIL | ng/mL sAPRIL |
| Maximum killing | 83.57 | 81.46 | 84.47 | 87.3 | 86.13 |
| rate % | | | | | |
| EC₅₀ (nM) | 0.07327 | 0.07866 | 0.09395 | 0.08791 | 0.1545 |
| T cell + | | PR002309 + 10 | PR002309 + 100 | PR002309 + 10 | PR002309 + 100 |
| NCI-H929 | PR002309 | ng/mL sBAFF | ng/mL sBAFF | ng/mL sAPRIL | ng/mL sAPRIL |
| Maximum killing | 78.49 | 79.37 | 79.63 | 76.24 | 78.13 |
| rate % | | | | | |
| EC₅₀ (nM) | 0.0004388 | 0.0004473 | 0.0004741 | 0.0005381 | 0.0009908 |
| PBMC + | | PR003178 + 10 | PR003178 + 100 | PR003178 + 10 | PR003178 + 100 |
| NCI-H929 | PR003178 | ng/mL sBAFF | ng/mL sBAFF | ng/ml sAPRIL | ng/mL sAPRIL |
| Maximum killing | 53.3 | 58 | 63.5 | 61.6 | 57.6 |
| rate % | | | | | |
| EC₅₀ (nM) | 0.007 | 0.005 | 0.008 | 0.009 | 0.011 |
| PBMC + | Positive | Positive control 2 + | Positive control 2 + | Positive control 2 + | Positive control 2 + |
| NCI-H929 | control 2 | 10 ng/mL sBAFF | 100 ng/mL sBAFF | 10 ng/ml sAPRIL | 100 ng/ml sAPRIL |
| Maximum killing | 60.5 | 58.3 | 67.7 | 61 | 67.2 |
| rate % | | | | | |
| EC₅₀ (nM) | 0.103 | 0.063 | 0.076 | 0.096 | 0.253 |
| PBMC + | Positive | Positive control 3 + | Positive control 3 + | Positive control 3 + | Positive control 3 + |
| NCI-H929 | control 3 | 10 ng/mL sBAFF | 100 ng/mL sBAFF | 10 ng/ml sAPRIL | 100 ng/ml sAPRIL |
| Maximum killing | 58.2 | 61.4 | 61.7 | 55.9 | 62.3 |
| rate % | | | | | |
| EC₅₀ (nM) | 0.014 | 0.015 | 0.022 | 0.027 | 0.026 |

### Example 7.12.3. Influence of Soluble BCMA on the Target Cell Killing Effect of Bispecific Antibody Molecules

[0790] BCMA is a transmembrane protein, but its extracellular region can be shed from the cell membrane to form soluble BCMA (sBCMA). The level of sBCMA is observed to increase to different degrees in the plasma of multiple myeloma patients, with the median concentration of 176.0 ng/mL (Leuk Res. 2019 June; 81: 62-66).

[0791] In this example, optimization was performed on the basis of the method described in Example 7.12.1 to investigate the influence of soluble BCMA (sBCMA) on the target cell killing effect of bispecific antibody molecules. Specifically, in the method described in Example 7.12.1, when the test antibodies at different concentrations were added, the recombinant human BCMA protein (ACRO Biosystems, #BCA-H522y) was also added at 20 μL/well to reach final concentrations of 500 ng/mL, 250 ng/mL, 125 ng/mL and 62.5 ng/mL. The effector cells were human PBMCs and the target cells were NCI-H929. Target cell killing rates were calculated by the method described in Example 7.12.1.

[0792] As shown in FIG. 62 and Table 7-33, the soluble BCMA had dose-dependent influence on the target cell killing rates (EC₅₀) of the bispecific antibody molecules, but did not affect the maximum killing rate. When the concentration of soluble BCMA was 176.0 ng/ml, the target cell killing rates (EC₅₀) of the bispecific antibody molecules PR002309 and PR003178 were superior to the positive control 2 and the positive control 3. In other words, the influence of soluble BCMA on the target cell killing rates of the bispecific antibody molecules PR002309 and PR003178 was less than that on the positive control 2 and positive control 3.

TABLE 7-33
Killing of NCI-H929 by BCMA × CD3 bispecific antibody molecules in the
presence of soluble BCMA at various concentrations

| | | PR001990 + | PR001990 + | PR001990 + | PR001990 + |
|---|---|---|---|---|---|
| T cell + | | 62.5 ng/ml | 125 ng/mL | 250 ng/mL | 500 ng/mL |
| NCI-H929 | PR001990 | sBCMA | sBCMA | sBCMA | sBCMA |
| Maximum | 83.77 | 82.11 | 83.23 | 82.17 | 82.71 |
| killing rate % | | | | | |
| EC₅₀ (nM) | 0.07867 | 0.1763 | 0.2341 | 0.387 | 0.5458 |
| | | PR002309 + | PR002309 + | PR002309 + | PR002309 + |
| T cell + | | 62.5 ng/mL | 125 ng/mL | 250 ng/mL | 500 ng/ml |
| NCI-H929 | PR002309 | sBCMA | sBCMA | sBCMA | sBCMA |
| Maxiimum | 78.68 | 78.68 | 77.21 | 78.39 | 78.47 |
| killing rate % | | | | | |
| EC₅₀ (nM) | 0.000393 | 0.002961 | 0.00347 | 0.005002 | 0.008797 |
| | | PR003178 + | PR003178 + | PR003178 + | PR003178 + |
| PBMC + | | 62.5 ng/ml | 125 ng/mL | 250 ng/ml | 500 ng/ml |
| NCI-H929 | PR003178 | sBCMA | sBCMA | sBCMA | sBCMA |
| Maximum | 56.1 | 51.7 | 52.2 | 50.9 | 45.2 |
| killing rate % | | | | | |
| EC₅₀ (nM) | 0.005 | 0.009 | 0.014 | 0.065 | 0.12 |
| | | Positive control | Positive control | Positive control | Positive control |
| PBMC + | Positive | 2 + 62.5 ng/ml | 2 + 125 ng/ml | 2 + 250 ng/ml | 2 + 500 ng/ml |
| NCI-H929 | control 2 | sBCMA | sBCMA | sBCMA | sBCMA |
| Maximum | 43.3 | 48.9 | 39.6 | 40.9 | 41.8 |
| killing rate % | | | | | |
| EC₅₀ (nM) | 0.2 | 0.8 | 1 | 3.5 | 7.7 |
| | | Positive control | Positive control | Positive control | Positive control |
| PBMC + | Positive | 3 + 62.5 ng/ml | 3 + 125 ng/ml | 3 + 250 ng/ml | 3 + 500 ng/ml |
| NCI- H929 | control 3 | sBCMA | sBCMA | sBCMA | sBCMA |
| Maximum | 57.3 | 58.6 | 55.5 | 56.8 | 68.3 |
| killing rate % | | | | | |
| EC₅₀ (nM) | 0.01 | 0.033 | 0.074 | 0.107 | 0.829 |

### Example 7.13. Pharmacokinetic Study

[0793] In this example, the pharmacokinetic properties of the BCMA×CD3 bispecific antibody molecule of a Fab-Fc-VH asymmetric structure (PR002929) and the BCMA×CD3 bispecific antibody molecule of a Fab-Fc-VH(2) asymmetric structure (PR003178) at a single dose in mice or rats were investigated.

[0794] The test was performed as follows: 6 female BALB/c mice or 3 SD rats with appropriate body weight were selected and administered with the fusion protein by intravenous injection at a dose of 5 mg/kg. The whole blood was collected before the administration and 0.25 h, 5 h, 24 h (1 day), 2 days, 4 days, 7 days, 10 days and 14 days after the administration, left to stand for 30 min for coagulation, and centrifuged at 2,000 g at 4° C. for 5 min, and the isolated serum sample was cryopreserved at −80° C. until it was taken for analysis. In this example, the drug concentration in the serum was quantitatively determined by two methods. The method I, namely the Fc end detection ELISA method, for quantitatively determining the drug concentration in the serum was performed by capturing BCMA×CD3 bispecific antibody molecules containing a human Fc end in the serum using a goat anti-human Fc polyclonal antibody coating a 96-well plate, and then adding an HRP-labeled goat anti-human Fc secondary antibody. The method II, namely the BCMA end detection ELISA method, for quantitatively determining the drug concentration in the serum was performed by capturing intact BCMA×CD3 bispecific antibody molecules containing an anti-BCMA VH end in the serum using a recombinant BCMA protein (Human BCMA/TNFRSF17 Protein His Tag, ACRO Biosystems, #BCA-H522y) coating a 96-well plate, and then adding an HRP-labeled goat anti-human Fc secondary antibody. Pharmacokinetic parameters were analyzed using Phoenix WinNonlin software version 8.2 by non-compartmental analysis (NCA).

[0795] As shown in FIG. 63 (A-B), the bispecific antibody molecules PR002929 and PR003178 had similar pharmacokinetics: under the Fc end detection method, the serum half-life t_{1/2} values of PR002929 and PR003178 in BALB/c mice were about 7 days and 9.6 days, respectively; under the BCMA end detection method, the serum half-life t_{1/2} values of PR002929 and PR003178 in mice were both about 4 days.

[0796] As shown in FIG. 63 (C), the serum half-life t_{1/2} values of PR003178 in rats under the Fc end detection method and the BCMA end detection method were about 5.6 days and 4.6 days, respectively.

[0797] The pharmacokinetic parameters of BCMA×CD3 bispecific antibody molecules in mice or rats were summarized in Table 7-34.

TABLE 7-34
Pharmacokinetic parameters of BCMA×CD3 bispecific antibody molecules in
mice or rats

| Bispecific | PR003178 | | PR002929 | | PR003178 | |
|---|---|---|---|---|---|---|
| antibody | | | | | | |
| molecules | | | | | | |
| Animals (number) | BALB/c mice (n = 6) | | BALB/c mice (n = 6) | | SD rats (n = 3) | |
| Antibody dosage | 5 mg/kg, I.V. | | 5 mg/kg, I.V. | | 5 mg/kg, I.V. | |
| | | BCMA | | BCMA | | BCMA |
| | Fc end | end | Fc end | end | Fc end | end |
| PK parameters | detection | detection | detection | detection | detection | detection |
| T½ (hr) | 230.5 | 98.0 | 167.5 | 100.8 | 135.1 | 109.8 |
| Vd (mL/kg) | 218.4 | 189.4 | 126.7 | 171.2 | 137.2 | 181.2 |
| AUCall | 4,650 | 3,381 | 6,886 | 3,878 | 5,593 | 3,799 |
| (μg*hour/mL) | | | | | | |
| Cl (mL/hr/kg) | 0.72 | 1.34 | 0.56 | 1.18 | 0.76 | 1.21 |
| C0 (μg/mL) | 93.4 | 87.4 | 106.4 | 100.1 | 83.3 | 76.3 |

### Example 7.14. Evaluation of Anti-Tumor Efficacy in NCI-H929/Human PBMC Mouse Model

[0798] This example is intended to evaluate the anti-tumor efficacy of BCMA×CD3 bispecific antibodies in vivo. Female NCG mice aged 6-8 week were intraperitoneally injected (i.p.) with 3×10⁶ human PBMCs 3 days before tumor cell inoculation, and then each was subcutaneously inoculated with 5×10⁶ NCI-H929 cells resuspended in a mixed solution of PBS and Matrigel (1:1) (0.1 mL/mice) on the day of tumor cell inoculation. When the tumor volume reached 90 mm³, the mice were randomized into groups of 6. After grouping, specific concentrations of antibody drugs diluted in PBS were administered intravenously (i.v.) at a specific dose and frequency. In this example, multiple dosing regimens were employed: 1) a 10 μg/mouse dose group, single dose; and 2) 10 μg/mouse and 3 μg/mouse dose groups, 1 dose per week for a total of 2 doses (QW×2). PBS was used as a blank for each experiment. Tumor volume and body weight of mice were measured on days 3, 7, 10 and 14 after the first administration. The tumor volume was calculated as follows: tumor volume (mm³)=0.5×(long diameter of tumor×short diameter of tumor²).

[0799] As shown in FIG. 64 (A-B), the bispecific antibody molecules such as PR001990, PR002309, PR002313 and the positive control 2 in the 10 μg/mouse single-dose groups showed efficacy in inhibiting tumor growth, and the PR001990 and PR002309 had significant superior efficacy to the positive control 2 molecule at an equal dose. The change in body weight of mice in each group was within the normal range.

[0800] As shown in FIG. 64 (C-D), all bispecific antibody molecules in different dose groups showed different degrees of efficacy in inhibiting tumor growth. Overall, the efficacy of the bispecific antibody molecules in the 10 μg/mouse group is superior to that in the 3 μg/mouse group. Moreover, at the dose of 10 μg/mouse, the efficacy of PR003177 and PR003178 was superior to that of the positive control 2 molecule QW×2 at an equal dose; and the efficacy of PR002895 in the 3 μg/mouse dose group was even slightly superior to that of the positive control 2 molecule in the 10 μg/mouse dose group. The change in body weight of mice in each group was within the normal range.

### Example 7.15. Summary

[0801] In this example, BCMA×CD3 bispecific antibody molecules of a variety of asymmetric structures are constructed using the antigen-binding domain Fab (or scFv form) of the anti-CD3 IgG antibody and the antigen-binding domain VH of the anti-BCMA HCAb antibody. This shows the flexibility of constructing a bispecific antibody molecular structure based on HCAb. The bispecific antibody molecules of this example can simultaneously bind to human BCMA and human T cells, and also to cynomolgus monkey BCMA and cynomolgus monkey T cells. Therefore, cynomolgus monkeys can be used for non-primate toxicological risk assessment, which is very important for clinical development. However, the positive control 2 bispecific antibody molecule does not have this property of binding to the cynomolgus monkey target.

[0802] In this example, a series of BCMA×CD3 bispecific antibody molecules are constructed. During their constructions, the binding ability to T cells is modified by regulating the sequence and the fine structure of the CD3-binding domain, and the binding ability to target cells expressing BCMA is modified by regulating the sequence and the number of the BCMA-binding domain, so that the T cell activation ability and specific target cell killing ability of the bispecific antibody molecules are further regulated. In an in vitro target cell killing assay, the bispecific antibody molecules of Fab-Fc-VH(2) asymmetric structures (PR002309, PR002895, PR002953 and PR003178) have superior target cell killing EC₅₀ to the positive control 2; moreover, PR002895, PR002953 and PR003178 caused lower release levels of various cytokines than the positive control 3. In an in vivo anti-tumor efficacy mouse model, the efficacy of PR002309 and PR003178 is significantly superior to that of the positive control 2 molecule at an equal dose; and the efficacy of PR002895 in the low dose group is even slightly superior to that of the positive control 2 molecule in the high dose group.

[0803] In particular, PR003178 has significantly superior target cell killing ability to the positive control 2 and has comparable target cell killing ability to the positive control 3. However, PR003178 has lower release levels of cytokines than the positive control 3. This indicates that PR003178 can control the release level of cytokines while maintaining effective tumor killing efficiency to reduce the risk of cytokine release syndrome, potentially better balancing efficacy and safety in the clinic and leading to a better therapeutic window.

The application's sequence listing, which the Patent Office published only in electronic form, follows.

SEQUENCE LISTING (523 sequences)

SEQ ID NO: 1 - protein, 25 aa, Artificial Sequence [sequence omitted]

SEQ ID NO: 2 - protein, 25 aa, Artificial Sequence
  PR000149 HFWR1 Chothia, PR002337 HFWR1 Chothia, PR002408 HFWR1 Chothia
QVQLVESGGGVVQPGRSLRLSCAAS

SEQ ID NO: 3 - protein, 25 aa, Artificial Sequence
  PR000184 HFWR1 Chothia, PR000218 HFWR1 Chothia
EVQLVESGGGLIQPGGSLRLSCAVS

SEQ ID NO: 4 - protein, 25 aa, Artificial Sequence [sequence omitted]

SEQ ID NO: 5 - protein, 25 aa, Artificial Sequence
  PR000260 HFWR1 Chothia
EVQLVESGGGLVQPKGSLKLSCAAS

SEQ ID NO: 6 - protein, 25 aa, Artificial Sequence [sequence omitted]

SEQ ID NO: 7 - protein, 25 aa, Artificial Sequence
  PR000483 HFWR1 Chothia
EVQLVQSGAEVKKPGESLRISCKGS

SEQ ID NO: 8 - protein, 25 aa, Artificial Sequence
  PR000510 HFWR1 Chothia, PR003886 HFWR1 Chothia
EVQLVESGGGLVQPGGSLKLSCAAS

SEQ ID NO: 9 - protein, 25 aa, Artificial Sequence
  PR000511 HFWR1 Chothia, PR000940 HFWR1 Chothia, PR001771 HFWR1 Chothia, PR001836 HFWR1 Chothia, PR001848 HFWR1 Chothia, PR004469 HFWR1 Chothia, PR004616 HFWR1 Chothia
EVQLLESGGGLVQPGGSLRLSCAAS

SEQ ID NO: 10 - protein, 25 aa, Artificial Sequence
  PR000943 HFWR1 Chothia, PR001035 HFWR1 Chothia, PR001046 HFWR1 Chothia, PR004559 HFWR1 Chothia, PR004560 HFWR1 Chothia, PR004561 HFWR1 Chothia, PR004562 HFWR1 Chothia, PR004563 HFWR1 Chothia, PR004564
EVQLVETGGGLIQPGGSLRLSCAAS

SEQ ID NO: 11 - protein, 25 aa, Artificial Sequence
  PR001758 HFWR1 Chothia
EVQLLESGGGLVQLGGSLRLSCAAS

SEQ ID NO: 12 - protein, 25 aa, Artificial Sequence
  PR001760 HFWR1 Chothia
EVQLVESGGGVVQPGGSLRLSCAAS

SEQ ID NO: 13 - protein, 25 aa, Artificial Sequence
  PR002161 HFWR1 Chothia, PR002163 HFWR1 Chothia, PR002340 HFWR1 Chothia
QVQLVQSGGGVVQPGRSLRLSCAAS

SEQ ID NO: 14 - protein, 25 aa, Artificial Sequence
  PR002410 HFWR1 Chothia
QVQLVQSGAEVKKPGSSMRVSCKAS

SEQ ID NO: 15 - protein, 7 aa, Artificial Sequence
  PR000070 HCDR1 Chothia, PR000149 HCDR1 Chothia, PR000265 HCDR1 Chothia, PR000416 HCDR1 Chothia, PR000940 HCDR1 Chothia, PR001840 HCDR1 Chothia, PR002161 HCDR1 Chothia
GFTFSSY

SEQ ID NO: 16 - protein, 7 aa, Artificial Sequence
  PR000151 HCDR1 Chothia
GFTFSDS

SEQ ID NO: 17 - protein, 7 aa, Artificial Sequence
  PR000184 HCDR1 Chothia, PR000218 HCDR1 Chothia
GFTVSKN

SEQ ID NO: 18 - protein, 7 aa, Artificial Sequence
  PR000197 HCDR1 Chothia, PR000448 HCDR1 Chothia, PR000628 HCDR1 Chothia
GGSFSGY

SEQ ID NO: 19 - protein, 7 aa, Artificial Sequence
  PR000210 HCDR1 Chothia
GFNIKDT

SEQ ID NO: 20 - protein, 7 aa, Artificial Sequence
  PR000260 HCDR1 Chothia, PR000510 HCDR1 Chothia, PR000511 HCDR1 Chothia
GFTFNTY

SEQ ID NO: 21 - protein, 7 aa, Artificial Sequence
  PR000274 HCDR1 Chothia
GGTFSNY

SEQ ID NO: 22 - protein, 7 aa, Artificial Sequence
  PR000483 HCDR1 Chothia
GYSFSTY

SEQ ID NO: 23 - protein, 7 aa, Artificial Sequence
  PR000672 HCDR1 Chothia
GFTFTDY

SEQ ID NO: 24 - protein, 7 aa, Artificial Sequence
  PR000943 HCDR1 Chothia
GFPVSSN

SEQ ID NO: 25 - protein, 7 aa, Artificial Sequence
  PR001035 HCDR1 Chothia
GFTVSSN

SEQ ID NO: 26 - protein, 7 aa, Artificial Sequence
  PR001046 HCDR1 Chothia, PR004559 HCDR1 Chothia
GFTVSDN

SEQ ID NO: 27 - protein, 7 aa, Artificial Sequence
  PR001758 HCDR1 Chothia
GFTFSRY

SEQ ID NO: 28 - protein, 7 aa, Artificial Sequence
  PR001760 HCDR1 Chothia, PR001771 HCDR1 Chothia, PR004469 HCDR1 Chothia
GFTFSNY

SEQ ID NO: 29 - protein, 7 aa, Artificial Sequence
  PR001836 HCDR1 Chothia
GFIFSNF

SEQ ID NO: 30 - protein, 7 aa, Artificial Sequence
  PR001848 HCDR1 Chothia, PR003886 HCDR1 Chothia, PR004616 HCDR1 Chothia
GFTFSTY

SEQ ID NO: 31 - protein, 7 aa, Artificial Sequence
  PR002163 HCDR1 Chothia, PR002337 HCDR1 Chothia, PR002340 HCDR1 Chothia
GFTFRSY

SEQ ID NO: 32 - protein, 7 aa, Artificial Sequence
  PR002408 HCDR1 Chothia
GFTFRSF

SEQ ID NO: 33 - protein, 7 aa, Artificial Sequence
  PR002410 HCDR1 Chothia
EDTFSSY

SEQ ID NO: 34 - protein, 7 aa, Artificial Sequence
  PR004560 HCDR1 Chothia, PR004565 HCDR1 Chothia, PR004568 HCDR1 Chothia, PR004570 HCDR1 Chothia, PR004574 HCDR1 Chothia
GFTVSDA

SEQ ID NO: 35 - protein, 7 aa, Artificial Sequence
  PR004561 HCDR1 Chothia, PR004562 HCDR1 Chothia, PR004564 HCDR1 Chothia, PR004566 HCDR1 Chothia, PR004567 HCDR1 Chothia, PR004569 HCDR1 Chothia, PR004571 HCDR1 Chothia, PR004572 HCDR1 Chothia, PR004573
GFTVSDS

SEQ ID NO: 36 - protein, 7 aa, Artificial Sequence
  PR004563 HCDR1 Chothia
GFTVYDN

SEQ ID NO: 37 - protein, 19 aa, Artificial Sequence
  PR000070 HFWR2 Chothia, PR000265 HFWR2 Chothia, PR000416 HFWR2 Chothia
WMSWVRQAPGKGLEWVANI

SEQ ID NO: 38 - protein, 19 aa, Artificial Sequence
  PR000149 HFWR2 Chothia
TMHWVRQAPGKGLEWVTFI

SEQ ID NO: 39 - protein, 19 aa, Artificial Sequence
  PR000151 HFWR2 Chothia
WIHWVRQAPGKGLEWVAWI

SEQ ID NO: 40 - protein, 19 aa, Artificial Sequence
  PR000184 HFWR2 Chothia, PR000218 HFWR2 Chothia
YMSWVRQAPGKGLEWVSVV

SEQ ID NO: 41 - protein, 19 aa, Artificial Sequence
  PR000197 HFWR2 Chothia, PR000448 HFWR2 Chothia
YWSWIRQPPGKGLEWIGEI

SEQ ID NO: 42 - protein, 19 aa, Artificial Sequence
  PR000210 HFWR2 Chothia
YIHWVRQAPGKGLEWVARI

SEQ ID NO: 43 - protein, 19 aa, Artificial Sequence
  PR000260 HFWR2 Chothia
AMNWVRQAPGKGLEWVARI

SEQ ID NO: 44 - protein, 19 aa, Artificial Sequence
  PR000274 HFWR2 Chothia
WMHWVRQAPGQGLEWMGAT

SEQ ID NO: 45 - protein, 19 aa, Artificial Sequence
  PR000483 HFWR2 Chothia
WISWVRQMPGKGLEWMGKI

SEQ ID NO: 46 - protein, 19 aa, Artificial Sequence
  PR000510 HFWR2 Chothia, PR003886 HFWR2 Chothia
AMNWVRQASGKGLEWVGRI

SEQ ID NO: 47 - protein, 19 aa, Artificial Sequence
  PR000511 HFWR2 Chothia, PR001848 HFWR2 Chothia, PR004616 HFWR2 Chothia
AMNWVRQAPGKGLEWVSRI

SEQ ID NO: 48 - protein, 19 aa, Artificial Sequence
  PR000628 HFWR2 Chothia
YWSWIRQSPEKGLEWIGEI

SEQ ID NO: 49 - protein, 19 aa, Artificial Sequence
  PR000672 HFWR2 Chothia
TMDWVRQAPGKGLEWVADV

SEQ ID NO: 50 - protein, 19 aa, Artificial Sequence
  PR000940 HFWR2 Chothia
AMIWVRQAPGKGLEWVSGI

SEQ ID NO: 51 - protein, 19 aa, Artificial Sequence
  PR000943 HFWR2 Chothia
YMSWVRQAPGKGLEWVSVI

SEQ ID NO: 52 - protein, 19 aa, Artificial Sequence
  PR001035 HFWR2 Chothia, PR001046 HFWR2 Chothia, PR004559 HFWR2 Chothia, PR004560 HFWR2 Chothia, PR004561 HFWR2 Chothia, PR004562 HFWR2 Chothia, PR004563 HFWR2 Chothia, PR004564 HFWR2 Chothia, PR004565
YMTWVRQAPGKGLEWVSVI

SEQ ID NO: 53 - protein, 19 aa, Artificial Sequence
  PR001758 HFWR2 Chothia, PR001760 HFWR2 Chothia
AMTWVRQAPEKGLEWVSSI

SEQ ID NO: 54 - protein, 19 aa, Artificial Sequence
  PR001771 HFWR2 Chothia
AMTWVRQPPGKGLEWVSSI

SEQ ID NO: 55 - protein, 19 aa, Artificial Sequence
  PR001836 HFWR2 Chothia
AMTWVRQPPEKGLKWVSSI

SEQ ID NO: 56 - protein, 19 aa, Artificial Sequence
  PR001840 HFWR2 Chothia
WMHWVRQAPGKGLVWVSRI

SEQ ID NO: 57 - protein, 19 aa, Artificial Sequence
  PR002161 HFWR2 Chothia, PR002408 HFWR2 Chothia
GMHWVRQAPGKGLEWVAVI

SEQ ID NO: 58 - protein, 19 aa, Artificial Sequence
  PR002163 HFWR2 Chothia, PR002340 HFWR2 Chothia
GMHWVRQAPGKGLEWVAII

SEQ ID NO: 59 - protein, 19 aa, Artificial Sequence
  PR002337 HFWR2 Chothia
GMHWVRQAPGKGLEWVGMI

SEQ ID NO: 60 - protein, 19 aa, Artificial Sequence
  PR002410 HFWR2 Chothia
AISWVRQAPGQGLEWMGGT

SEQ ID NO: 61 - protein, 19 aa, Artificial Sequence
  PR004469 HFWR2 Chothia
AMSWFRQPPETGLKWVSSI

SEQ ID NO: 62 - protein, 6 aa, Artificial Sequence
  PR000070 HCDR2 Chothia
KQDGSE

SEQ ID NO: 63 - protein, 6 aa, Artificial Sequence
  PR000149 HCDR2 Chothia
SYDGNN

SEQ ID NO: 64 - protein, 6 aa, Artificial Sequence
  PR000151 HCDR2 Chothia
SPYGGS

SEQ ID NO: 65 - protein, 5 aa, Artificial Sequence
  PR000184 HCDR2 Chothia, PR000218 HCDR2 Chothia
YSGGS

SEQ ID NO: 66 - protein, 5 aa, Artificial Sequence
  PR000197 HCDR2 Chothia
NHSGS

SEQ ID NO: 67 - protein, 6 aa, Artificial Sequence
  PR000210 HCDR2 Chothia
YPTNGY

SEQ ID NO: 68 - protein, 8 aa, Artificial Sequence
  PR000260 HCDR2 Chothia, PR000510 HCDR2 Chothia, PR000511 HCDR2 Chothia, PR001848 HCDR2 Chothia, PR003886 HCDR2 Chothia, PR004616 HCDR2 Chothia
RSKYNNYA

SEQ ID NO: 69 - protein, 6 aa, Artificial Sequence
  PR000265 HCDR2 Chothia, PR000416 HCDR2 Chothia
KQEGSE

SEQ ID NO: 70 - protein, 6 aa, Artificial Sequence
  PR000274 HCDR2 Chothia
YRGHSD

SEQ ID NO: 71 - protein, 5 aa, Artificial Sequence
  PR000448 HCDR2 Chothia
QHSGS

SEQ ID NO: 72 - protein, 6 aa, Artificial Sequence
  PR000483 HCDR2 Chothia
YPGDSY

SEQ ID NO: 73 - protein, 5 aa, Artificial Sequence
  PR000628 HCDR2 Chothia
NHGGY

SEQ ID NO: 74 - protein, 6 aa, Artificial Sequence
  PR000672 HCDR2 Chothia
NPNSGG

SEQ ID NO: 75 - protein, 6 aa, Artificial Sequence
  PR000940 HCDR2 Chothia
SESGGS

SEQ ID NO: 76 - protein, 5 aa, Artificial Sequence
  PR000943 HCDR2 Chothia, PR004564 HCDR2 Chothia, PR004566 HCDR2 Chothia, PR004568 HCDR2 Chothia, PR004569 HCDR2 Chothia, PR004570 HCDR2 Chothia, PR004574 HCDR2 Chothia
FSGGR

SEQ ID NO: 77 - protein, 5 aa, Artificial Sequence
  PR001035 HCDR2 Chothia
FSGGS

SEQ ID NO: 78 - protein, 5 aa, Artificial Sequence
  PR001046 HCDR2 Chothia, PR004560 HCDR2 Chothia, PR004561 HCDR2 Chothia, PR004565 HCDR2 Chothia
FSGGN

SEQ ID NO: 79 - protein, 6 aa, Artificial Sequence
  PR001758 HCDR2 Chothia
SGSGDD

SEQ ID NO: 80 - protein, 6 aa, Artificial Sequence
  PR001760 HCDR2 Chothia
SGSGVS

SEQ ID NO: 81 - protein, 6 aa, Artificial Sequence
  PR001771 HCDR2 Chothia
SGSGGS

SEQ ID NO: 82 - protein, 6 aa, Artificial Sequence
  PR001836 HCDR2 Chothia
NGSGFN

SEQ ID NO: 83 - protein, 6 aa, Artificial Sequence
  PR001840 HCDR2 Chothia
NSDGSS

SEQ ID NO: 84 - protein, 6 aa, Artificial Sequence
  PR002161 HCDR2 Chothia
YYDGRN

SEQ ID NO: 85 - protein, 6 aa, Artificial Sequence
  PR002163 HCDR2 Chothia, PR002340 HCDR2 Chothia
YYDGSN

SEQ ID NO: 86 - protein, 6 aa, Artificial Sequence
  PR002337 HCDR2 Chothia
YYNGKN

SEQ ID NO: 87 - protein, 6 aa, Artificial Sequence
  PR002408 HCDR2 Chothia
SYDASN

SEQ ID NO: 88 - protein, 6 aa, Artificial Sequence
  PR002410 HCDR2 Chothia
APIFGT

SEQ ID NO: 89 - protein, 6 aa, Artificial Sequence
  PR004469 HCDR2 Chothia
DASGGD

SEQ ID NO: 90 - protein, 5 aa, Artificial Sequence
  PR004559 HCDR2 Chothia, PR004562 HCDR2 Chothia, PR004563 HCDR2 Chothia, PR004567 HCDR2 Chothia, PR004571 HCDR2 Chothia, PR004572 HCDR2 Chothia, PR004573 HCDR2 Chothia
FSGGK

SEQ ID NO: 91 - protein, 41 aa, Artificial Sequence
  PR000070 HFWR3 Chothia, PR000265 HFWR3 Chothia, PR000416 HFWR3 Chothia
KYYVDSVKGRFTISRDNAKNSLYLQMNSLRAEDTAVYYCAR

SEQ ID NO: 92 - protein, 41 aa, Artificial Sequence
  PR000149 HFWR3 Chothia
KYYADSVKGRFTISRDNSKNTLYLQMNSLRAEDTAIYYCAR

SEQ ID NO: 93 - protein, 41 aa, Artificial Sequence
  PR000151 HFWR3 Chothia
TYYADSVKGRFTISADTSKNTAYLQMNSLRAEDTAVYYCAR

SEQ ID NO: 94 - protein, 41 aa, Artificial Sequence
  PR000184 HFWR3 Chothia, PR000218 HFWR3 Chothia
KTYADSVKGRFTISRDNSKNTLYLQMNSLRAEDTAVYYCAR

SEQ ID NO: 95 - protein, 41 aa, Artificial Sequence
  PR000197 HFWR3 Chothia, PR000448 HFWR3 Chothia
TDSNPSLKGRVTFSVDTSKNQFSLKLNSVTAADTAVYYCAR

SEQ ID NO: 96 - protein, 41 aa, Artificial Sequence
  PR000210 HFWR3 Chothia
TRYADSVKGRFTISADTSKNTAYLQMNSLRAEDTAVYYCSR

SEQ ID NO: 97 - protein, 41 aa, Artificial Sequence
  PR000260 HFWR3 Chothia
TYYADSVKDRFTISRDDSQSILYLQMNNLKTEDTAMYYCVR

SEQ ID NO: 98 - protein, 41 aa, Artificial Sequence
  PR000274 HFWR3 Chothia
TYYNQKFKGRVTITADKSTSTAYMELSSLRSEDTAVYYCAR

SEQ ID NO: 99 - protein, 41 aa, Artificial Sequence
  PR000483 HFWR3 Chothia
TNYSPSFQGQVTISADKSISTAYLQWSSLKASDTAMYYCAR

SEQ ID NO: 100 - protein, 41 aa, Artificial Sequence
  PR000510 HFWR3 Chothia
TYYADSVKDRFTISRDDSKSTLYLQMNSLKTEDTAVYYCVR

SEQ ID NO: 101 - protein, 41 aa, Artificial Sequence
  PR000511 HFWR3 Chothia, PR001848 HFWR3 Chothia
TYYADSVKDRFTISRDDSKSTLYLQMNSLRAEDTAVYYCVR

SEQ ID NO: 102 - protein, 41 aa, Artificial Sequence
  PR000628 HFWR3 Chothia
VTYNPSLESRVTISVDTSKNQFSLKLSSVTAADTAVYYCAR

SEQ ID NO: 103 - protein, 41 aa, Artificial Sequence
  PR000672 HFWR3 Chothia
SIYNQRFKGRFTLSVDRSKNTLYLQMNSLRAEDTAVYYCAR

SEQ ID NO: 104 - protein, 41 aa, Artificial Sequence
  PR000940 HFWR3 Chothia
TYYADSVKGRFTISRDNSKNTLYLQMNSLRAEDTAVYFCVK

SEQ ID NO: 105 - protein, 41 aa, Artificial Sequence
  PR000943 HFWR3 Chothia, PR001035 HFWR3 Chothia
TYYADSVKGRFTISRDNSKNTLYLQMNSLRAEDTAVYYCAR

SEQ ID NO: 106 - protein, 41 aa, Artificial Sequence
  PR001046 HFWR3 Chothia, PR004559 HFWR3 Chothia, PR004561 HFWR3 Chothia, PR004570 HFWR3 Chothia, PR004573 HFWR3 Chothia
TYYADSVKGRFTISRDNAKNTLYLQMNSLRAEDTALYYCAR

SEQ ID NO: 107 - protein, 41 aa, Artificial Sequence
  PR001758 HFWR3 Chothia
TYYGDSVKGRFTISRDNSQNTVYLQMNSLRAEDTAVYFCAK

SEQ ID NO: 108 - protein, 41 aa, Artificial Sequence
  PR001760 HFWR3 Chothia
TYYADSVKGRFTISRDNSKNTLYLQMTRLTAEDTAVYFCAK

SEQ ID NO: 109 - protein, 41 aa, Artificial Sequence
  PR001771 HFWR3 Chothia, PR004469 HFWR3 Chothia
TYYADSVKGRFTISRDNSKNTLYLQMNSLRAEDTAVYYCAK

SEQ ID NO: 110 - protein, 41 aa, Artificial Sequence
  PR001836 HFWR3 Chothia
TYYTDSVKGRFTISRDNSRNTLYLQMNRLTAEDTAVYFCAK

SEQ ID NO: 111 - protein, 41 aa, Artificial Sequence
  PR001840 HFWR3 Chothia
TSYADSVQGRFTISRDNAKNTLYLQMNSLRAEDTAVYYCVR

SEQ ID NO: 112 - protein, 41 aa, Artificial Sequence
  PR002161 HFWR3 Chothia
KYYADSVKGRFTISRDNSKNMLYLQMNGLRAEDTAVYYCAR

SEQ ID NO: 113 - protein, 41 aa, Artificial Sequence
  PR002163 HFWR3 Chothia, PR002340 HFWR3 Chothia
KYYADSVKGRFTISRDNSKNTLYLQMNSLRAEDTAVYYCAR

SEQ ID NO: 114 - protein, 41 aa, Artificial Sequence
  PR002337 HFWR3 Chothia
KYYADSVKGRFTISRDNSRNTLYLQMNGLRAEDTAVYYCAR

SEQ ID NO: 115 - protein, 41 aa, Artificial Sequence
  PR002408 HFWR3 Chothia
EYYADSVKGRFIISRDNSKDTLYLQMNSLRAGDTAVYYCAK

SEQ ID NO: 116 - protein, 41 aa, Artificial Sequence
  PR002410 HFWR3 Chothia
TNYAQKFQGRVTITADKSTSTAYMELSSLRSEDTAVYYCAR

SEQ ID NO: 117 - protein, 41 aa, Artificial Sequence
  PR003886 HFWR3 Chothia
TYYADSVKDRFTISRDDSKNTAYLQMNSLKTEDTAVYYCTR

SEQ ID NO: 118 - protein, 41 aa, Artificial Sequence
  PR004560 HFWR3 Chothia, PR004565 HFWR3 Chothia
TYVSDSVKGRFTISRDNAKNTLYLQMNSLRAEDTALYYCAR

SEQ ID NO: 119 - protein, 41 aa, Artificial Sequence
  PR004562 HFWR3 Chothia, PR004564 HFWR3 Chothia, PR004566 HFWR3 Chothia, PR004569 HFWR3 Chothia, PR004571 HFWR3 Chothia, PR004574 HFWR3 Chothia
TYYSDSVKGRFTISRDNAKNTLYLQMNSLRAEDTALYYCAR

SEQ ID NO: 120 - protein, 41 aa, Artificial Sequence
  PR004563 HFWR3 Chothia, PR004567 HFWR3 Chothia, PR004568 HFWR3 Chothia, PR004572 HFWR3 Chothia
TYVADSVKGRFTISRDNAKNTLYLQMNSLRAEDTALYYCAR

SEQ ID NO: 121 - protein, 41 aa, Artificial Sequence
  PR004616 HFWR3 Chothia
TYYADSVKDRFTISRDNSKNTLYLQMNSLRAEDTAVYYCAK

SEQ ID NO: 122 - protein, 10 aa, Artificial Sequence
  PR000070 HCDR3 Chothia, PR000265 HCDR3 Chothia, PR000416 HCDR3 Chothia
DRAVAGAFDI

SEQ ID NO: 123 - protein, 9 aa, Artificial Sequence
  PR000149 HCDR3 Chothia
TGWLGPFDY

SEQ ID NO: 124 - protein, 9 aa, Artificial Sequence
  PR000151 HCDR3 Chothia
RHWPGGFDY

SEQ ID NO: 125 - protein, 11 aa, Artificial Sequence
  PR000184 HCDR3 Chothia, PR000218 HCDR3 Chothia
AVPHSPSSFDI

SEQ ID NO: 126 - protein, 7 aa, Artificial Sequence
  PR000197 HCDR3 Chothia, PR000448 HCDR3 Chothia
LTGPFDY

SEQ ID NO: 127 - protein, 11 aa, Artificial Sequence
  PR000210 HCDR3 Chothia
WGGDGFYAMDY

SEQ ID NO: 128 - protein, 14 aa, Artificial Sequence
  PR000260 HCDR3 Chothia, PR000510 HCDR3 Chothia, PR000511 HCDR3 Chothia, PR001848 HCDR3 Chothia, PR003886 HCDR3 Chothia, PR004616 HCDR3 Chothia
HGNFGNSYVSWFAY

SEQ ID NO: 129 - protein, 12 aa, Artificial Sequence
  PR000274 HCDR3 Chothia
GAIYDGYDVLDN

SEQ ID NO: 130 - protein, 7 aa, Artificial Sequence
  PR000483 HCDR3 Chothia
GYGIFDY

SEQ ID NO: 131 - protein, 13 aa, Artificial Sequence
  PR000628 HCDR3 Chothia
DYGPGNYDWYFDL

SEQ ID NO: 132 - protein, 10 aa, Artificial Sequence
  PR000672 HCDR3 Chothia
NLGPSFYFDY

SEQ ID NO: 133 - protein, 13 aa, Artificial Sequence
  PR000940 HCDR3 Chothia
DLDDILTGYYKDY

SEQ ID NO: 134 - protein, 12 aa, Artificial Sequence
  PR000943 HCDR3 Chothia
RNWIDGRDAFDI

SEQ ID NO: 135 - protein, 12 aa, Artificial Sequence
  PR001035 HCDR3 Chothia
RIAVAGHDVFDI

SEQ ID NO: 136 - protein, 14 aa, Artificial Sequence
  PR001046 HCDR3 Chothia, PR004559 HCDR3 Chothia, PR004566 HCDR3 Chothia, PR004568 HCDR3 Chothia, PR004572 HCDR3 Chothia, PR004573 HCDR3 Chothia
RNYDDTRGTDVFDI

SEQ ID NO: 137 - protein, 15 aa, Artificial Sequence
  PR001758 HCDR3 Chothia
EKAGTTGDYYYNVDV

SEQ ID NO: 138 - protein, 15 aa, Artificial Sequence
  PR001760 HCDR3 Chothia, PR001836 HCDR3 Chothia
EGSSETDDHYYNVDV

SEQ ID NO: 139 - protein, 15 aa, Artificial Sequence
  PR001771 HCDR3 Chothia
EGTGTTSDYYYNVDV

SEQ ID NO: 140 - protein, 14 aa, Artificial Sequence
  PR001840 HCDR3 Chothia
KGSSSYYHYSIEDD

SEQ ID NO: 141 - protein, 9 aa, Artificial Sequence
  PR002161 HCDR3 Chothia, PR002337 HCDR3 Chothia
GPGYNWLDP

SEQ ID NO: 142 - protein, 9 aa, Artificial Sequence
  PR002163 HCDR3 Chothia, PR002340 HCDR3 Chothia
GLGYNWFDP

SEQ ID NO: 143 - protein, 10 aa, Artificial Sequence
  PR002408 HCDR3 Chothia
GGGLRWYFAY

SEQ ID NO: 144 - protein, 7 aa, Artificial Sequence
  PR002410 HCDR3 Chothia
GGPYFDY

SEQ ID NO: 145 - protein, 15 aa, Artificial Sequence
  PR004469 HCDR3 Chothia
EGSHGTDDSHYDVDV

SEQ ID NO: 146 - protein, 14 aa, Artificial Sequence
  PR004560 HCDR3 Chothia, PR004563 HCDR3 Chothia, PR004567 HCDR3 Chothia, PR004569 HCDR3 Chothia, PR004570 HCDR3 Chothia, PR004574 HCDR3 Chothia
RNYDQTRGTDVFDI

SEQ ID NO: 147 - protein, 14 aa, Artificial Sequence
  PR004561 HCDR3 Chothia, PR004562 HCDR3 Chothia, PR004564 HCDR3 Chothia
RNYDQTLGTDVFDI

SEQ ID NO: 148 - protein, 14 aa, Artificial Sequence
  PR004565 HCDR3 Chothia, PR004571 HCDR3 Chothia
RNYDQTIGTDVFDI

SEQ ID NO: 149 - protein, 11 aa, Artificial Sequence
  PR000070 HFWR4 Chothia, PR000184 HFWR4 Chothia, PR000218 HFWR4 Chothia, PR000265 HFWR4 Chothia, PR000416 HFWR4 Chothia, PR000943 HFWR4 Chothia, PR001035 HFWR4 Chothia, PR001046 HFWR4 Chothia, PR004559
WGQGTMVTVSS

SEQ ID NO: 150 - protein, 11 aa, Artificial Sequence
  PR000149 HFWR4 Chothia, PR000151 HFWR4 Chothia, PR000197 HFWR4 Chothia, PR000210 HFWR4 Chothia, PR000274 HFWR4 Chothia, PR000448 HFWR4 Chothia, PR000483 HFWR4 Chothia, PR000510 HFWR4 Chothia, PR000511
WGQGTLVTVSS

SEQ ID NO: 151 - protein, 11 aa, Artificial Sequence
  PR000260 HFWR4 Chothia
WGQGTLVTVSA

SEQ ID NO: 152 - protein, 11 aa, Artificial Sequence
  PR000628 HFWR4 Chothia
WGRGTLVTVSS

SEQ ID NO: 153 - protein, 11 aa, Artificial Sequence
  PR001758 HFWR4 Chothia, PR001760 HFWR4 Chothia, PR001771 HFWR4 Chothia, PR001836 HFWR4 Chothia, PR004469 HFWR4 Chothia
WGQGTTVTVSS

SEQ ID NO: 154 - protein, 23 aa, Artificial Sequence
  PR000070 LFWR1 Chothia, PR000265 LFWR1 Chothia, PR000416 LFWR1 Chothia
DIQMTQSPSTLSASVGDRVTVTC

SEQ ID NO: 155 - protein, 23 aa, Artificial Sequence
  PR000149 LFWR1 Chothia
EIVLTQSPGTLSLSPGERATLSC

SEQ ID NO: 156 - protein, 23 aa, Artificial Sequence
  PR000151 LFWR1 Chothia, PR000210 LFWR1 Chothia, PR000274 LFWR1 Chothia, PR000672 LFWR1 Chothia
DIQMTQSPSSLSASVGDRVTITC

SEQ ID NO: 157 - protein, 23 aa, Artificial Sequence
  PR000197 LFWR1 Chothia
EFVMTQSPATLSVSPGERATLSC

SEQ ID NO: 158 - protein, 22 aa, Artificial Sequence
  PR000260 LFWR1 Chothia
QAVVTQESALTTSPGETVTLTC

SEQ ID NO: 159 - protein, 23 aa, Artificial Sequence
  PR000448 LFWR1 Chothia, PR002408 LFWR1 Chothia
EIVMTQSPATLSVSPGERATLSC

SEQ ID NO: 160 - protein, 22 aa, Artificial Sequence
  PR000483 LFWR1 Chothia
SYELTQPPSVSVSPGQTASITC

SEQ ID NO: 161 - protein, 22 aa, Artificial Sequence
  PR000510 LFWR1 Chothia, PR000511 LFWR1 Chothia, PR001848 LFWR1 Chothia, PR003886 LFWR1 Chothia, PR004616 LFWR1 Chothia
QAVVTQEPSLTVSPGGTVTLTC

SEQ ID NO: 162 - protein, 23 aa, Artificial Sequence
  PR000628 LFWR1 Chothia
EIVLTQSPATLSLSPGERATLSC

SEQ ID NO: 163 - protein, 23 aa, Artificial Sequence
  PR002161 LFWR1 Chothia, PR002337 LFWR1 Chothia
EIVLTQSPATLSVSPGERATLSC

SEQ ID NO: 164 - protein, 23 aa, Artificial Sequence
  PR002163 LFWR1 Chothia
DIQLTQSPSSLSASVGDRVTITC

SEQ ID NO: 165 - protein, 23 aa, Artificial Sequence
  PR002340 LFWR1 Chothia
DIVMTQSPSSLSASVGDRVTITC

SEQ ID NO: 166 - protein, 23 aa, Artificial Sequence
  PR002410 LFWR1 Chothia
EIVMTQSPASLSVSPGERATLSC

SEQ ID NO: 167 - protein, 11 aa, Artificial Sequence
  PR000070 LCDR1 Chothia, PR000265 LCDR1 Chothia, PR000416 LCDR1 Chothia
RASQSIYIWLA

SEQ ID NO: 168 - protein, 12 aa, Artificial Sequence
  PR000149 LCDR1 Chothia
RASQSVGSSYLA

SEQ ID NO: 169 - protein, 11 aa, Artificial Sequence
  PR000151 LCDR1 Chothia
RASQDVSTAVA

SEQ ID NO: 170 - protein, 11 aa, Artificial Sequence
  PR000197 LCDR1 Chothia, PR000448 LCDR1 Chothia
RASQSISSILA

SEQ ID NO: 171 - protein, 11 aa, Artificial Sequence
  PR000210 LCDR1 Chothia
RASQDVNTAVA

SEQ ID NO: 172 - protein, 14 aa, Artificial Sequence
  PR000260 LCDR1 Chothia, PR000510 LCDR1 Chothia, PR000511 LCDR1 Chothia, PR001848 LCDR1 Chothia, PR003886 LCDR1 Chothia, PR004616 LCDR1 Chothia
RSSTGAVTTSNYAN

SEQ ID NO: 173 - protein, 11 aa, Artificial Sequence
  PR000274 LCDR1 Chothia
SASQDISNYLN

SEQ ID NO: 174 - protein, 11 aa, Artificial Sequence
  PR000483 LCDR1 Chothia
SGDNIGDQYAH

SEQ ID NO: 175 - protein, 11 aa, Artificial Sequence
  PR000628 LCDR1 Chothia
RASQSVSSYLA

SEQ ID NO: 176 - protein, 11 aa, Artificial Sequence
  PR000672 LCDR1 Chothia
KASQDVSIGVA

SEQ ID NO: 177 - protein, 11 aa, Artificial Sequence
  PR002161 LCDR1 Chothia, PR002337 LCDR1 Chothia, PR002410 LCDR1 Chothia
RASQSVSSNLA

SEQ ID NO: 178 - protein, 11 aa, Artificial Sequence
  PR002163 LCDR1 Chothia
RASQSISSYLN

SEQ ID NO: 179 - protein, 11 aa, Artificial Sequence
  PR002340 LCDR1 Chothia
RASQGISNYLA

SEQ ID NO: 180 - protein, 11 aa, Artificial Sequence
  PR002408 LCDR1 Chothia
RASQSISSNLG

SEQ ID NO: 181 - protein, 15 aa, Artificial Sequence
  PR000070 LFWR2 Chothia, PR000265 LFWR2 Chothia, PR000416 LFWR2 Chothia
WYQQKPGKAPNLLIY

SEQ ID NO: 182 - protein, 15 aa, Artificial Sequence
  PR000149 LFWR2 Chothia, PR000197 LFWR2 Chothia, PR000448 LFWR2 Chothia, PR000628 LFWR2 Chothia, PR002161 LFWR2 Chothia, PR002337 LFWR2 Chothia, PR002408 LFWR2 Chothia, PR002410 LFWR2 Chothia
WYQQKPGQAPRLLIY

SEQ ID NO: 183 - protein, 15 aa, Artificial Sequence
  PR000151 LFWR2 Chothia, PR000210 LFWR2 Chothia, PR000274 LFWR2 Chothia, PR000672 LFWR2 Chothia, PR002163 LFWR2 Chothia
WYQQKPGKAPKLLIY

SEQ ID NO: 184 - protein, 15 aa, Artificial Sequence
  PR000260 LFWR2 Chothia
WVQEKPDHLFTGLIG

SEQ ID NO: 185 - protein, 15 aa, Artificial Sequence
  PR000483 LFWR2 Chothia
WYQQKPGQSPVLVIY

SEQ ID NO: 186 - protein, 15 aa, Artificial Sequence
  PR000510 LFWR2 Chothia, PR000511 LFWR2 Chothia, PR001848 LFWR2 Chothia, PR003886 LFWR2 Chothia, PR004616 LFWR2 Chothia
WVQQKPGQAPRGLIG

SEQ ID NO: 187 - protein, 15 aa, Artificial Sequence
  PR002340 LFWR2 Chothia
WYQQKPGKVPKLLIY

SEQ ID NO: 188 - protein, 7 aa, Artificial Sequence
  PR000070 LCDR2 Chothia, PR000265 LCDR2 Chothia, PR000416 LCDR2 Chothia
KASSLET

SEQ ID NO: 189 - protein, 7 aa, Artificial Sequence
  PR000149 LCDR2 Chothia
GAFSRAT

SEQ ID NO: 190 - protein, 7 aa, Artificial Sequence
  PR000151 LCDR2 Chothia, PR000210 LCDR2 Chothia
SASFLYS

SEQ ID NO: 191 - protein, 7 aa, Artificial Sequence
  PR000197 LCDR2 Chothia, PR000448 LCDR2 Chothia, PR002161 LCDR2 Chothia, PR002337 LCDR2 Chothia, PR002408 LCDR2 Chothia, PR002410 LCDR2 Chothia
GASTRAT

SEQ ID NO: 192 - protein, 7 aa, Artificial Sequence
  PR000260 LCDR2 Chothia, PR000510 LCDR2 Chothia, PR000511 LCDR2 Chothia, PR001848 LCDR2 Chothia, PR003886 LCDR2 Chothia, PR004616 LCDR2 Chothia
GTNKRAP

SEQ ID NO: 193 - protein, 7 aa, Artificial Sequence
  PR000274 LCDR2 Chothia
YTSNLHS

SEQ ID NO: 194 - protein, 7 aa, Artificial Sequence
  PR000483 LCDR2 Chothia
QDKNRPS

SEQ ID NO: 195 - protein, 7 aa, Artificial Sequence
  PR000628 LCDR2 Chothia
DASNRAT

SEQ ID NO: 196 - protein, 7 aa, Artificial Sequence
  PR000672 LCDR2 Chothia
SASYRYT

SEQ ID NO: 197 - protein, 7 aa, Artificial Sequence
  PR002163 LCDR2 Chothia
AASSLQS

SEQ ID NO: 198 - protein, 7 aa, Artificial Sequence
  PR002340 LCDR2 Chothia
AASTLQS

SEQ ID NO: 199 - protein, 32 aa, Artificial Sequence
  PR000070 LFWR3 Chothia, PR000265 LFWR3 Chothia, PR000416 LFWR3 Chothia
GVPSRFSGSGSGTEFTLTISSLQPDDFATYYC

SEQ ID NO: 200 - protein, 32 aa, Artificial Sequence
  PR000149 LFWR3 Chothia
GIPDRFSGSGSGTDFTLTISRLEPEDFAVYYC

SEQ ID NO: 201 - protein, 32 aa, Artificial Sequence
  PR000151 LFWR3 Chothia, PR000274 LFWR3 Chothia, PR000672 LFWR3 Chothia, PR002163 LFWR3 Chothia
GVPSRFSGSGSGTDFTLTISSLQPEDFATYYC

SEQ ID NO: 202 - protein, 32 aa, Artificial Sequence
  PR000197 LFWR3 Chothia, PR000448 LFWR3 Chothia, PR002337 LFWR3 Chothia, PR002408 LFWR3 Chothia
GIPARFSGSGSGTEFTLTISSLQSEDFAVYYC

SEQ ID NO: 203 - protein, 32 aa, Artificial Sequence
  PR000210 LFWR3 Chothia
GVPSRFSGSRSGTDFTLTISSLQPEDFATYYC

SEQ ID NO: 204 - protein, 32 aa, Artificial Sequence
  PR000260 LFWR3 Chothia
GVPARFSGSLIGDKAALTITGAQTEDEAIYFC

SEQ ID NO: 205 - protein, 32 aa, Artificial Sequence
  PR000483 LFWR3 Chothia
GIPERFSGSNSGNTATLTISGTQAMDEADYYC

SEQ ID NO: 206 - protein, 32 aa, Artificial Sequence
  PR000510 LFWR3 Chothia, PR000511 LFWR3 Chothia, PR001848 LFWR3 Chothia, PR003886 LFWR3 Chothia, PR004616 LFWR3 Chothia
WTPARFSGSLLGDKAALTLLGAQPEDEAEYFC

SEQ ID NO: 207 - protein, 32 aa, Artificial Sequence
  PR000628 LFWR3 Chothia
GIPARFSGSGSGTDFTLTISSLEPEDFAVYYC

SEQ ID NO: 208 - protein, 32 aa, Artificial Sequence
  PR002161 LFWR3 Chothia
GIPARFSGSGSGTEFTLTISSLQSEDVATYYC

SEQ ID NO: 209 - protein, 32 aa, Artificial Sequence
  PR002340 LFWR3 Chothia
GVPSRFSGSGSGTDFTLTISSLQPEDVATYYC

SEQ ID NO: 210 - protein, 32 aa, Artificial Sequence
  PR002410 LFWR3 Chothia
GIPARVSGGGSGTEFTLTISSLQSEDFAVYYC

SEQ ID NO: 211 - protein, 9 aa, Artificial Sequence
  PR000070 LCDR3 Chothia, PR000265 LCDR3 Chothia, PR000416 LCDR3 Chothia
QQYYGSSRT

SEQ ID NO: 212 - protein, 9 aa, Artificial Sequence
  PR000149 LCDR3 Chothia
QQYGSSPWT

SEQ ID NO: 213 - protein, 9 aa, Artificial Sequence
  PR000151 LCDR3 Chothia
QQYLYHPAT

SEQ ID NO: 214 - protein, 9 aa, Artificial Sequence
  PR000197 LCDR3 Chothia, PR000448 LCDR3 Chothia
QQYYNWPLT

SEQ ID NO: 215 - protein, 9 aa, Artificial Sequence
  PR000210 LCDR3 Chothia
QQHYTTPPT

SEQ ID NO: 216 - protein, 9 aa, Artificial Sequence
  PR000260 LCDR3 Chothia, PR000510 LCDR3 Chothia, PR000511 LCDR3 Chothia, PR001848 LCDR3 Chothia, PR003886 LCDR3 Chothia, PR004616 LCDR3 Chothia
ALWYSNLWV

SEQ ID NO: 217 - protein, 9 aa, Artificial Sequence
  PR000274 LCDR3 Chothia
QQYRKLPWT

SEQ ID NO: 218 - protein, 11 aa, Artificial Sequence
  PR000483 LCDR3 Chothia
ATYTGFGSLAV

SEQ ID NO: 219 - protein, 11 aa, Artificial Sequence
  PR000628 LCDR3 Chothia
QQRSNWPPALT

SEQ ID NO: 220 - protein, 9 aa, Artificial Sequence
  PR000672 LCDR3 Chothia
QQYYIYPYT

SEQ ID NO: 221 - protein, 9 aa, Artificial Sequence
  PR002161 LCDR3 Chothia
QKYNSAPLT

SEQ ID NO: 222 - protein, 9 aa, Artificial Sequence
  PR002163 LCDR3 Chothia
QQSYRTPLT

SEQ ID NO: 223 - protein, 9 aa, Artificial Sequence
  PR002337 LCDR3 Chothia
QQYNNWPLT

SEQ ID NO: 224 - protein, 9 aa, Artificial Sequence
  PR002340 LCDR3 Chothia
QKYNSAPYT

SEQ ID NO: 225 - protein, 10 aa, Artificial Sequence
  PR002408 LCDR3 Chothia
QQYQSWPPLT

SEQ ID NO: 226 - protein, 9 aa, Artificial Sequence
  PR002410 LCDR3 Chothia
QQYKNWPFT

SEQ ID NO: 227 - protein, 10 aa, Artificial Sequence
  PR000070 LFWR4 Chothia, PR000149 LFWR4 Chothia, PR000151 LFWR4 Chothia, PR000210 LFWR4 Chothia, PR000265 LFWR4 Chothia, PR000416 LFWR4 Chothia, PR000672 LFWR4 Chothia, PR002340 LFWR4 Chothia
FGQGTKVEIK

SEQ ID NO: 228 - protein, 10 aa, Artificial Sequence
  PR000197 LFWR4 Chothia, PR000448 LFWR4 Chothia, PR000628 LFWR4 Chothia, PR002163 LFWR4 Chothia, PR002337 LFWR4 Chothia, PR002408 LFWR4 Chothia
FGGGTKVEIK

SEQ ID NO: 229 - protein, 10 aa, Artificial Sequence
  PR000260 LFWR4 Chothia, PR000483 LFWR4 Chothia, PR000510 LFWR4 Chothia, PR000511 LFWR4 Chothia, PR001848 LFWR4 Chothia, PR003886 LFWR4 Chothia, PR004616 LFWR4 Chothia
FGGGTKLTVL

SEQ ID NO: 230 - protein, 10 aa, Artificial Sequence
  PR000274 LFWR4 Chothia
FGQGTKLEIK

SEQ ID NO: 231 - protein, 10 aa, Artificial Sequence
  PR002161 LFWR4 Chothia
FGGGTKLEIK

SEQ ID NO: 232 - protein, 10 aa, Artificial Sequence
  PR002410 LFWR4 Chothia
FGPGTKLEIK

SEQ ID NO: 233 - protein, 119 aa, Artificial Sequence
  PR000070 VH
EVQLVESGGGLVQPGGSLRLSCAASGFTFSSYWMSWVRQAPGKGLEWVANIKQDGSEKYYVDSVKGRFTISRDNAKNSLYLQMNSLRAEDTAVYYCARDRAVAGAFDIWGQGTMVTVSS

SEQ ID NO: 234 - protein, 118 aa, Artificial Sequence
  PR000149 VH
QVQLVESGGGVVQPGRSLRLSCAASGFTFSSYTMHWVRQAPGKGLEWVTFISYDGNNKYYADSVKGRFTISRDNSKNTLYLQMNSLRAEDTAIYYCARTGWLGPFDYWGQGTLVTVSS

SEQ ID NO: 235 - protein, 118 aa, Artificial Sequence [sequence omitted]

SEQ ID NO: 236 - protein, 119 aa, Artificial Sequence
  PR000184 VH, PR000218 VH
EVQLVESGGGLIQPGGSLRLSCAVSGFTVSKNYMSWVRQAPGKGLEWVSVVYSGGSKTYADSVKGRFTISRDNSKNTLYLQMNSLRAEDTAVYYCARAVPHSPSSFDIWGQGTMVTVSS

SEQ ID NO: 237 - protein, 115 aa, Artificial Sequence
  PR000197 VH
QVQLQQWGAGLLKPSETLSLTCAVYGGSFSGYYWSWIRQPPGKGLEWIGEINHSGSTDSNPSLKGRVTFSVDTSKNQFSLKLNSVTAADTAVYYCARLTGPFDYWGQGTLVTVSS

SEQ ID NO: 238 - protein, 120 aa, Artificial Sequence [sequence omitted]

SEQ ID NO: 239 - protein, 125 aa, Artificial Sequence
  PR000260 VH
EVQLVESGGGLVQPKGSLKLSCAASGFTFNTYAMNWVRQAPGKGLEWVARIRSKYNNYATYYADSVKDRFTISRDDSQSILYLQMNNLKTEDTAMYYCVRHGNFGNSYVSWFAYWGQGTLVTVSA

SEQ ID NO: 240 - protein, 119 aa, Artificial Sequence
  PR000265 VH, PR000416 VH
EVQLVESGGGLVQPGGSLRLSCAASGFTFSSYWMSWVRQAPGKGLEWVANIKQEGSEKYYVDSVKGRFTISRDNAKNSLYLQMNSLRAEDTAVYYCARDRAVAGAFDIWGQGTMVTVSS

SEQ ID NO: 241 - protein, 121 aa, Artificial Sequence
  PR000274 VH
QVQLVQSGAEVKKPGSSVKVSCKASGGTFSNYWMHWVRQAPGQGLEWMGATYRGHSDTYYNQKFKGRVTITADKSTSTAYMELSSLRSEDTAVYYCARGAIYDGYDVLDNWGQGTLVTVSS

SEQ ID NO: 242 - protein, 115 aa, Artificial Sequence
  PR000448 VH
QVQLQQWGAGLLKPSETLSLTCAVYGGSFSGYYWSWIRQPPGKGLEWIGEIQHSGSTDSNPSLKGRVTFSVDTSKNQFSLKLNSVTAADTAVYYCARLTGPFDYWGQGTLVTVSS

SEQ ID NO: 243 - protein, 116 aa, Artificial Sequence
  PR000483 VH
EVQLVQSGAEVKKPGESLRISCKGSGYSFSTYWISWVRQMPGKGLEWMGKIYPGDSYTNYSPSFQGQVTISADKSISTAYLQWSSLKASDTAMYYCARGYGIFDYWGQGTLVTVSS

SEQ ID NO: 244 - protein, 125 aa, Artificial Sequence
  PR000510 VH
EVQLVESGGGLVQPGGSLKLSCAASGFTFNTYAMNWVRQASGKGLEWVGRIRSKYNNYATYYADSVKDRFTISRDDSKSTLYLQMNSLKTEDTAVYYCVRHGNFGNSYVSWFAYWGQGTLVTVSS

SEQ ID NO: 245 - protein, 125 aa, Artificial Sequence
  PR000511 VH
EVQLLESGGGLVQPGGSLRLSCAASGFTFNTYAMNWVRQAPGKGLEWVSRIRSKYNNYATYYADSVKDRFTISRDDSKSTLYLQMNSLRAEDTAVYYCVRHGNFGNSYVSWFAYWGQGTLVTVSS

SEQ ID NO: 246 - protein, 121 aa, Artificial Sequence [sequence omitted]

SEQ ID NO: 247 - protein, 119 aa, Artificial Sequence [sequence omitted]

SEQ ID NO: 248 - protein, 122 aa, Artificial Sequence
  PR000940 VH
EVQLLESGGGLVQPGGSLRLSCAASGFTFSSYAMIWVRQAPGKGLEWVSGISESGGSTYYADSVKGRFTISRDNSKNTLYLQMNSLRAEDTAVYFCVKDLDDILTGYYKDYWGQGTLVTVSS

SEQ ID NO: 249 - protein, 120 aa, Artificial Sequence
  PR000943 VH
EVQLVETGGGLIQPGGSLRLSCAASGFPVSSNYMSWVRQAPGKGLEWVSVIFSGGRTYYADSVKGRFTISRDNSKNTLYLQMNSLRAEDTAVYYCARRNWIDGRDAFDIWGQGTMVTVSS

SEQ ID NO: 250 - protein, 120 aa, Artificial Sequence
  PR001035 VH
EVQLVETGGGLIQPGGSLRLSCAASGFTVSSNYMTWVRQAPGKGLEWVSVIFSGGSTYYADSVKGRFTISRDNSKNTLYLQMNSLRAEDTAVYYCARRIAVAGHDVFDIWGQGTMVTVSS

SEQ ID NO: 251 - protein, 122 aa, Artificial Sequence
  PR001046 VH
EVQLVETGGGLIQPGGSLRLSCAASGFTVSDNYMTWVRQAPGKGLEWVSVIFSGGNTYYADSVKGRFTISRDNAKNTLYLQMNSLRAEDTALYYCARRNYDDTRGTDVFDIWGQGTMVTVSS

SEQ ID NO: 252 - protein, 124 aa, Artificial Sequence
  PR001758 VH
EVQLLESGGGLVQLGGSLRLSCAASGFTFSRYAMTWVRQAPEKGLEWVSSISGSGDDTYYGDSVKGRFTISRDNSQNTVYLQMNSLRAEDTAVYFCAKEKAGTTGDYYYNVDVWGQGTTVTVSS

SEQ ID NO: 253 - protein, 124 aa, Artificial Sequence
  PR001760 VH
EVQLVESGGGVVQPGGSLRLSCAASGFTFSNYAMTWVRQAPEKGLEWVSSISGSGVSTYYADSVKGRFTISRDNSKNTLYLQMTRLTAEDTAVYFCAKEGSSETDDHYYNVDVWGQGTTVTVSS

SEQ ID NO: 254 - protein, 124 aa, Artificial Sequence
  PR001771 VH
EVQLLESGGGLVQPGGSLRLSCAASGFTFSNYAMTWVRQPPGKGLEWVSSISGSGGSTYYADSVKGRFTISRDNSKNTLYLQMNSLRAEDTAVYYCAKEGTGTTSDYYYNVDVWGQGTTVTVSS

SEQ ID NO: 255 - protein, 124 aa, Artificial Sequence
  PR001836 VH
EVQLLESGGGLVQPGGSLRLSCAASGFIFSNFAMTWVRQPPEKGLKWVSSINGSGFNTYYTDSVKGRFTISRDNSRNTLYLQMNRLTAEDTAVYFCAKEGSSETDDHYYNVDVWGQGTTVTVSS

SEQ ID NO: 256 - protein, 123 aa, Artificial Sequence
  PR001840 VH
EVQLVESGGGLVQPGGSLRLSCAASGFTFSSYWMHWVRQAPGKGLVWVSRINSDGSSTSYADSVQGRFTISRDNAKNTLYLQMNSLRAEDTAVYYCVRKGSSSYYHYSIEDDWGQGTLVTVSS

SEQ ID NO: 257 - protein, 125 aa, Artificial Sequence
  PR001848 VH
EVQLLESGGGLVQPGGSLRLSCAASGFTFSTYAMNWVRQAPGKGLEWVSRIRSKYNNYATYYADSVKDRFTISRDDSKSTLYLQMNSLRAEDTAVYYCVRHGNFGNSYVSWFAYWGQGTLVTVSS

SEQ ID NO: 258 - protein, 118 aa, Artificial Sequence
  PR002161 VH
QVQLVQSGGGVVQPGRSLRLSCAASGFTFSSYGMHWVRQAPGKGLEWVAVIYYDGRNKYYADSVKGRFTISRDNSKNMLYLQMNGLRAEDTAVYYCARGPGYNWLDPWGQGTLVTVSS

SEQ ID NO: 259 - protein, 118 aa, Artificial Sequence
  PR002163 VH, PR002340 VH
QVQLVQSGGGVVQPGRSLRLSCAASGFTFRSYGMHWVRQAPGKGLEWVAIIYYDGSNKYYADSVKGRFTISRDNSKNTLYLQMNSLRAEDTAVYYCARGLGYNWFDPWGQGTLVTVSS

SEQ ID NO: 260 - protein, 118 aa, Artificial Sequence
  PR002337 VH
QVQLVESGGGVVQPGRSLRLSCAASGFTFRSYGMHWVRQAPGKGLEWVGMIYYNGKNKYYADSVKGRFTISRDNSRNTLYLQMNGLRAEDTAVYYCARGPGYNWLDPWGQGTLVTVSS

SEQ ID NO: 261 - protein, 119 aa, Artificial Sequence
  PR002408 VH
QVQLVESGGGVVQPGRSLRLSCAASGFTFRSFGMHWVRQAPGKGLEWVAVISYDASNEYYADSVKGRFIISRDNSKDTLYLQMNSLRAGDTAVYYCAKGGGLRWYFAYWGQGTLVTVSS

SEQ ID NO: 262 - protein, 116 aa, Artificial Sequence
  PR002410 VH
QVQLVQSGAEVKKPGSSMRVSCKASEDTFSSYAISWVRQAPGQGLEWMGGTAPIFGTTNYAQKFQGRVTITADKSTSTAYMELSSLRSEDTAVYYCARGGPYFDYWGQGTLVTVSS

SEQ ID NO: 263 - protein, 125 aa, Artificial Sequence
  PR003886 VH
EVQLVESGGGLVQPGGSLKLSCAASGFTFSTYAMNWVRQASGKGLEWVGRIRSKYNNYATYYADSVKDRFTISRDDSKNTAYLQMNSLKTEDTAVYYCTRHGNFGNSYVSWFAYWGQGTLVTVSS

SEQ ID NO: 264 - protein, 124 aa, Artificial Sequence
  PR004469 VH
EVQLLESGGGLVQPGGSLRLSCAASGFTFSNYAMSWFRQPPETGLKWVSSIDASGGDTYYADSVKGRFTISRDNSKNTLYLQMNSLRAEDTAVYYCAKEGSHGTDDSHYDVDVWGQGTTVTVSS

SEQ ID NO: 265 - protein, 122 aa, Artificial Sequence
  PR004559 VH
EVQLVETGGGLIQPGGSLRLSCAASGFTVSDNYMTWVRQAPGKGLEWVSVIFSGGKTYYADSVKGRFTISRDNAKNTLYLQMNSLRAEDTALYYCARRNYDDTRGTDVFDIWGQGTMVTVSS

SEQ ID NO: 266 - protein, 122 aa, Artificial Sequence
  PR004560 VH
EVQLVETGGGLIQPGGSLRLSCAASGFTVSDAYMTWVRQAPGKGLEWVSVIFSGGNTYVSDSVKGRFTISRDNAKNTLYLQMNSLRAEDTALYYCARRNYDQTRGTDVFDIWGQGTMVTVSS

SEQ ID NO: 267 - protein, 122 aa, Artificial Sequence
  PR004561 VH
EVQLVETGGGLIQPGGSLRLSCAASGFTVSDSYMTWVRQAPGKGLEWVSVIFSGGNTYYADSVKGRFTISRDNAKNTLYLQMNSLRAEDTALYYCARRNYDQTLGTDVFDIWGQGTMVTVSS

SEQ ID NO: 268 - protein, 122 aa, Artificial Sequence
  PR004562 VH
EVQLVETGGGLIQPGGSLRLSCAASGFTVSDSYMTWVRQAPGKGLEWVSVIFSGGKTYYSDSVKGRFTISRDNAKNTLYLQMNSLRAEDTALYYCARRNYDQTLGTDVFDIWGQGTMVTVSS

SEQ ID NO: 269 - protein, 122 aa, Artificial Sequence
  PR004563 VH
EVQLVETGGGLIQPGGSLRLSCAASGFTVYDNYMTWVRQAPGKGLEWVSVIFSGGKTYVADSVKGRFTISRDNAKNTLYLQMNSLRAEDTALYYCARRNYDQTRGTDVFDIWGQGTMVTVSS

SEQ ID NO: 270 - protein, 122 aa, Artificial Sequence
  PR004564 VH
EVQLVETGGGLIQPGGSLRLSCAASGFTVSDSYMTWVRQAPGKGLEWVSVIFSGGRTYYSDSVKGRFTISRDNAKNTLYLQMNSLRAEDTALYYCARRNYDQTLGTDVFDIWGQGTMVTVSS

SEQ ID NO: 271 - protein, 122 aa, Artificial Sequence
  PR004565 VH
EVQLVETGGGLIQPGGSLRLSCAASGFTVSDAYMTWVRQAPGKGLEWVSVIFSGGNTYVSDSVKGRFTISRDNAKNTLYLQMNSLRAEDTALYYCARRNYDQTIGTDVFDIWGQGTMVTVSS

SEQ ID NO: 272 - protein, 122 aa, Artificial Sequence
  PR004566 VH
EVQLVETGGGLIQPGGSLRLSCAASGFTVSDSYMTWVRQAPGKGLEWVSVIFSGGRTYYSDSVKGRFTISRDNAKNTLYLQMNSLRAEDTALYYCARRNYDDTRGTDVFDIWGQGTMVTVSS

SEQ ID NO: 273 - protein, 122 aa, Artificial Sequence
  PR004567 VH
EVQLVETGGGLIQPGGSLRLSCAASGFTVSDSYMTWVRQAPGKGLEWVSVIFSGGKTYVADSVKGRFTISRDNAKNTLYLQMNSLRAEDTALYYCARRNYDQTRGTDVFDIWGQGTMVTVSS

SEQ ID NO: 274 - protein, 122 aa, Artificial Sequence
  PR004568 VH
EVQLVETGGGLIQPGGSLRLSCAASGFTVSDAYMTWVRQAPGKGLEWVSVIFSGGRTYVADSVKGRFTISRDNAKNTLYLQMNSLRAEDTALYYCARRNYDDTRGTDVFDIWGQGTMVTVSS

SEQ ID NO: 275 - protein, 122 aa, Artificial Sequence
  PR004569 VH
EVQLVETGGGLIQPGGSLRLSCAASGFTVSDSYMTWVRQAPGKGLEWVSVIFSGGRTYYSDSVKGRFTISRDNAKNTLYLQMNSLRAEDTALYYCARRNYDQTRGTDVFDIWGQGTMVTVSS

SEQ ID NO: 276 - protein, 122 aa, Artificial Sequence
  PR004570 VH
EVQLVETGGGLIQPGGSLRLSCAASGFTVSDAYMTWVRQAPGKGLEWVSVIFSGGRTYYADSVKGRFTISRDNAKNTLYLQMNSLRAEDTALYYCARRNYDQTRGTDVFDIWGQGTMVTVSS

SEQ ID NO: 277 - protein, 122 aa, Artificial Sequence
  PR004571 VH
EVQLVETGGGLIQPGGSLRLSCAASGFTVSDSYMTWVRQAPGKGLEWVSVIFSGGKTYYSDSVKGRFTISRDNAKNTLYLQMNSLRAEDTALYYCARRNYDQTIGTDVFDIWGQGTMVTVSS

SEQ ID NO: 278 - protein, 122 aa, Artificial Sequence
  PR004572 VH
EVQLVETGGGLIQPGGSLRLSCAASGFTVSDSYMTWVRQAPGKGLEWVSVIFSGGKTYVADSVKGRFTISRDNAKNTLYLQMNSLRAEDTALYYCARRNYDDTRGTDVFDIWGQGTMVTVSS

SEQ ID NO: 279 - protein, 122 aa, Artificial Sequence
  PR004573 VH
EVQLVETGGGLIQPGGSLRLSCAASGFTVSDSYMTWVRQAPGKGLEWVSVIFSGGKTYYADSVKGRFTISRDNAKNTLYLQMNSLRAEDTALYYCARRNYDDTRGTDVFDIWGQGTMVTVSS

SEQ ID NO: 280 - protein, 122 aa, Artificial Sequence
  PR004574 VH
EVQLVETGGGLIQPGGSLRLSCAASGFTVSDAYMTWVRQAPGKGLEWVSVIFSGGRTYYSDSVKGRFTISRDNAKNTLYLQMNSLRAEDTALYYCARRNYDQTRGTDVFDIWGQGTMVTVSS

SEQ ID NO: 281 - protein, 125 aa, Artificial Sequence
  PR004616 VH
EVQLLESGGGLVQPGGSLRLSCAASGFTFSTYAMNWVRQAPGKGLEWVSRIRSKYNNYATYYADSVKDRFTISRDNSKNTLYLQMNSLRAEDTAVYYCAKHGNFGNSYVSWFAYWGQGTLVTVSS

SEQ ID NO: 282 - protein, 107 aa, Artificial Sequence
  PR000070 VL, PR000265 VL, PR000416 VL
DIQMTQSPSTLSASVGDRVTVTCRASQSIYIWLAWYQQKPGKAPNLLIYKASSLETGVPSRFSGSGSGTEFTLTISSLQPDDFATYYCQQYYGSSRTFGQGTKVEIK

SEQ ID NO: 283 - protein, 108 aa, Artificial Sequence
  PR000149 VL
EIVLTQSPGTLSLSPGERATLSCRASQSVGSSYLAWYQQKPGQAPRLLIYGAFSRATGIPDRFSGSGSGTDFTLTISRLEPEDFAVYYCQQYGSSPWTFGQGTKVEIK

SEQ ID NO: 284 - protein, 107 aa, Artificial Sequence [sequence omitted]

SEQ ID NO: 285 - protein, 107 aa, Artificial Sequence
  PR000197 VL
EFVMTQSPATLSVSPGERATLSCRASQSISSILAWYQQKPGQAPRLLIYGASTRATGIPARFSGSGSGTEFTLTISSLQSEDFAVYYCQQYYNWPLTFGGGTKVEIK

SEQ ID NO: 286 - protein, 107 aa, Artificial Sequence [sequence omitted]

SEQ ID NO: 287 - protein, 109 aa, Artificial Sequence
  PR000260 VL
QAVVTQESALTTSPGETVTLTCRSSTGAVTTSNYANWVQEKPDHLFTGLIGGTNKRAPGVPARFSGSLIGDKAALTITGAQTEDEAIYFCALWYSNLWVFGGGTKLTVL

SEQ ID NO: 288 - protein, 107 aa, Artificial Sequence
  PR000274 VL
DIQMTQSPSSLSASVGDRVTITCSASQDISNYLNWYQQKPGKAPKLLIYYTSNLHSGVPSRFSGSGSGTDFTLTISSLQPEDFATYYCQQYRKLPWTFGQGTKLEIK

SEQ ID NO: 289 - protein, 107 aa, Artificial Sequence
  PR000448 VL
EIVMTQSPATLSVSPGERATLSCRASQSISSILAWYQQKPGQAPRLLIYGASTRATGIPARFSGSGSGTEFTLTISSLQSEDFAVYYCQQYYNWPLTFGGGTKVEIK

SEQ ID NO: 290 - protein, 108 aa, Artificial Sequence
  PR000483 VL
SYELTQPPSVSVSPGQTASITCSGDNIGDQYAHWYQQKPGQSPVLVIYQDKNRPSGIPERFSGSNSGNTATLTISGTQAMDEADYYCATYTGFGSLAVFGGGTKLTVL

SEQ ID NO: 291 - protein, 109 aa, Artificial Sequence
  PR000510 VL, PR000511 VL, PR001848 VL, PR003886 VL, PR004616 VL
QAVVTQEPSLTVSPGGTVTLTCRSSTGAVTTSNYANWVQQKPGQAPRGLIGGTNKRAPWTPARFSGSLLGDKAALTLLGAQPEDEAEYFCALWYSNLWVFGGGTKLTVL

SEQ ID NO: 292 - protein, 109 aa, Artificial Sequence [sequence omitted]

SEQ ID NO: 293 - protein, 107 aa, Artificial Sequence [sequence omitted]

SEQ ID NO: 294 - protein, 107 aa, Artificial Sequence
  PR002161 VL
EIVLTQSPATLSVSPGERATLSCRASQSVSSNLAWYQQKPGQAPRLLIYGASTRATGIPARFSGSGSGTEFTLTISSLQSEDVATYYCQKYNSAPLTFGGGTKLEIK

SEQ ID NO: 295 - protein, 107 aa, Artificial Sequence
  PR002163 VL
DIQLTQSPSSLSASVGDRVTITCRASQSISSYLNWYQQKPGKAPKLLIYAASSLQSGVPSRFSGSGSGTDFTLTISSLQPEDFATYYCQQSYRTPLTFGGGTKVEIK

SEQ ID NO: 296 - protein, 107 aa, Artificial Sequence
  PR002337 VL
EIVLTQSPATLSVSPGERATLSCRASQSVSSNLAWYQQKPGQAPRLLIYGASTRATGIPARFSGSGSGTEFTLTISSLQSEDFAVYYCQQYNNWPLTFGGGTKVEIK

SEQ ID NO: 297 - protein, 107 aa, Artificial Sequence
  PR002340 VL
DIVMTQSPSSLSASVGDRVTITCRASQGISNYLAWYQQKPGKVPKLLIYAASTLQSGVPSRFSGSGSGTDFTLTISSLQPEDVATYYCQKYNSAPYTFGQGTKVEIK

SEQ ID NO: 298 - protein, 108 aa, Artificial Sequence
  PR002408 VL
EIVMTQSPATLSVSPGERATLSCRASQSISSNLGWYQQKPGQAPRLLIYGASTRATGIPARFSGSGSGTEFTLTISSLQSEDFAVYYCQQYQSWPPLTFGGGTKVEIK

SEQ ID NO: 299 - protein, 107 aa, Artificial Sequence
  PR002410 VL
EIVMTQSPASLSVSPGERATLSCRASQSVSSNLAWYQQKPGQAPRLLIYGASTRATGIPARVSGGGSGTEFTLTISSLQSEDFAVYYCQQYKNWPFTFGPGTKLEIK

SEQ ID NO: 300 - protein, 450 aa, Artificial Sequence
  PR000070 HC
SEVQLVESGGGLVQPGGSLRLSCAASGFTFSSYWMSWVRQAPGKGLEWVANIKQDGSEKYYVDSVKGRFTISRDNAKNSLYLQMNSLRAEDTAVYYCARDRAVAGAFDIWGQGTMVTVSSASTKGPSVFPLAPSSKSTSGGTAALGCLVKDYFPEPVTVSWNSGALTSGVHTFPAVLQSSGLYSLSSVVTVPSSSLGTQTYICNVNHKPSNTKVDKKVEPKSCDKTHTCPPCPAPELLGGPSVFLFPPKPKDTLMISRTPEVTCVVVDVSHEDPEVKFNWYVDGVEVHNAKTKPREEQYASTYRVVSVLTVLHQDWLNGKEYKCKVSNKALPAPIEKTISKAKGQPREPQVYTLPPSREEMTKNQVSLTCLVKGFYPSDIAVEWESNGQPENNYKTTPPVLDSDGSFFLYSKLTVDKSRWQQGNVFSCSVMHEALHNHYTQKSLSLSPGK

SEQ ID NO: 301 - protein, 448 aa, Artificial Sequence
  PR000149 HC
QVQLVESGGGVVQPGRSLRLSCAASGFTFSSYTMHWVRQAPGKGLEWVTFISYDGNNKYYADSVKGRFTISRDNSKNTLYLQMNSLRAEDTAIYYCARTGWLGPFDYWGQGTLVTVSSASTKGPSVFPLAPSSKSTSGGTAALGCLVKDYFPEPVTVSWNSGALTSGVHTFPAVLQSSGLYSLSSVVTVPSSSLGTQTYICNVNHKPSNTKVDKKVEPKSCDKTHTCPPCPAPELLGGPSVFLFPPKPKDTLMISRTPEVTCVVVDVSHEDPEVKFNWYVDGVEVHNAKTKPREEQYNSTYRVVSVLTVLHQDWLNGKEYKCKVSNKALPAPIEKTISKAKGQPREPQVYTLPPSREEMTKNQVSLTCLVKGFYPSDIAVEWESNGQPENNYKTTPPVLDSDGSFFLYSKLTVDKSRWQQGNVFSCSVMHEALHNHYTQKSLSLSPGK

SEQ ID NO: 302 - protein, 448 aa, Artificial Sequence
  PR000151 HC
EVQLVESGGGLVQPGGSLRLSCAASGFTFSDSWIHWVRQAPGKGLEWVAWISPYGGSTYYADSVKGRFTISADTSKNTAYLQMNSLRAEDTAVYYCARRHWPGGFDYWGQGTLVTVSSASTKGPSVFPLAPSSKSTSGGTAALGCLVKDYFPEPVTVSWNSGALTSGVHTFPAVLQSSGLYSLSSVVTVPSSSLGTQTYICNVNHKPSNTKVDKKVEPKSCDKTHTCPPCPAPELLGGPSVFLFPPKPKDTLMISRTPEVTCVVVDVSHEDPEVKFNWYVDGVEVHNAKTKPREEQYASTYRVVSVLTVLHQDWLNGKEYKCKVSNKALPAPIEKTISKAKGQPREPQVYTLPPSREEMTKNQVSLTCLVKGFYPSDIAVEWESNGQPENNYKTTPPVLDSDGSFFLYSKLTVDKSRWQQGNVFSCSVMHEALHNHYTQKSLSLSPGK

SEQ ID NO: 303 - protein, 351 aa, Artificial Sequence
  PR000184 HC
EVQLVESGGGLIQPGGSLRLSCAVSGFTVSKNYMSWVRQAPGKGLEWVSVVYSGGSKTYADSVKGRFTISRDNSKNTLYLQMNSLRAEDTAVYYCARAVPHSPSSFDIWGQGTMVTVSSEPKSCDKTHTCPPCPAPELLGGPSVFLFPPKPKDTLMISRTPEVTCVVVDVSHEDPEVKFNWYVDGVEVHNAKTKPREEQYNSTYRVVSVLTVLHQDWLNGKEYKCKVSNKALPAPIEKTISKAKGQPREPQVYTLPPSREEMTKNQVSLTCLVKGFYPSDIAVEWESNGQPENNYKTTPPVLDSDGSFFLYSKLTVDKSRWQQGNVFSCSVMHEALHNHYTQKSLSLSPGK

SEQ ID NO: 304 - protein, 442 aa, Artificial Sequence
  PR000197 HC
QVQLQQWGAGLLKPSETLSLTCAVYGGSFSGYYWSWIRQPPGKGLEWIGEINHSGSTDSNPSLKGRVTFSVDTSKNQFSLKLNSVTAADTAVYYCARLTGPFDYWGQGTLVTVSSASTKGPSVFPLAPCSRSTSESTAALGCLVKDYFPEPVTVSWNSGALTSGVHTFPAVLQSSGLYSLSSVVTVPSSSLGTKTYTCNVDHKPSNTKVDKRVESKYGPPCPPCPAPEFLGGPSVFLFPPKPKDTLMISRTPEVTCVVVDVSQEDPEVQFNWYVDGVEVHNAKTKPREEQFNSTYRVVSVLTVLHQDWLNGKEYKCKVSNKGLPSSIEKTISKAKGQPREPQVYTLPPSQEEMTKNQVSLTCLVKGFYPSDIAVEWESNGQPENNYKTTPPVLDSDGSFFLYSRLTVDKSRWQEGNVFSCSVMHEALHNHYTQKSLSLSLGK

SEQ ID NO: 305 - protein, 450 aa, Artificial Sequence
  PR000210 HC, PR001584 Chain
EVQLVESGGGLVQPGGSLRLSCAASGFNIKDTYIHWVRQAPGKGLEWVARIYPTNGYTRYADSVKGRFTISADTSKNTAYLQMNSLRAEDTAVYYCSRWGGDGFYAMDYWGQGTLVTVSSASTKGPSVFPLAPSSKSTSGGTAALGCLVKDYFPEPVTVSWNSGALTSGVHTFPAVLQSSGLYSLSSVVTVPSSSLGTQTYICNVNHKPSNTKVDKKVEPKSCDKTHTCPPCPAPELLGGPSVFLFPPKPKDTLMISRTPEVTCVVVDVSHEDPEVKFNWYVDGVEVHNAKTKPREEQYNSTYRVVSVLTVLHQDWLNGKEYKCKVSNKALPAPIEKTISKAKGQPREPQVYTLPPSREEMTKNQVSLTCLVKGFYPSDIAVEWESNGQPENNYKTTPPVLDSDGSFFLYSKLTVDKSRWQQGNVFSCSVMHEALHNHYTQKSLSLSPGK

SEQ ID NO: 306 - protein, 351 aa, Artificial Sequence
  PR000218 HC
EVQLVESGGGLIQPGGSLRLSCAVSGFTVSKNYMSWVRQAPGKGLEWVSVVYSGGSKTYADSVKGRFTISRDNSKNTLYLQMNSLRAEDTAVYYCARAVPHSPSSFDIWGQGTMVTVSSEPKSCDKTHTCPPCPAPELLGGPDVFLFPPKPKDTLMISRTPEVTCVVVDVSHEDPEVKFNWYVDGVEVHNAKTKPREEQYNSTYRVVSVLTVLHQDWLNGKEYKCKVSNKALPAPEEKTISKAKGQPREPQVYTLPPSREEMTKNQVSLTCLVKGFYPSDIAVEWESNGQPENNYKTTPPVLDSDGSFFLYSKLTVDKSRWQQGNVFSCSVMHEALHNHYTQKSLSLSPGK

SEQ ID NO: 307 - protein, 455 aa, Artificial Sequence
  PR000260 HC
EVQLVESGGGLVQPKGSLKLSCAASGFTFNTYAMNWVRQAPGKGLEWVARIRSKYNNYATYYADSVKDRFTISRDDSQSILYLQMNNLKTEDTAMYYCVRHGNFGNSYVSWFAYWGQGTLVTVSAASTKGPSVFPLAPSSKSTSGGTAALGCLVKDYFPEPVTVSWNSGALTSGVHTFPAVLQSSGLYSLSSVVTVPSSSLGTQTYICNVNHKPSNTKVDKKVEPKSCDKTHTCPPCPAPEAAGGPSVFLFPPKPKDTLMISRTPEVTCVVVDVSHEDPEVKFNWYVDGVEVHNAKTKPREEQYNSTYRVVSVLTVLHQDWLNGKEYKCKVSNKALPAPIEKTISKAKGQPREPQVYTLPPSREEMTKNQVSLTCLVKGFYPSDIAVEWESNGQPENNYKTTPPVLDSDGSFFLYSKLTVDKSRWQQGNVFSCSVMHEALHNHYTQKSLSLSPGK

SEQ ID NO: 308 - protein, 449 aa, Artificial Sequence
  PR000265 HC
EVQLVESGGGLVQPGGSLRLSCAASGFTFSSYWMSWVRQAPGKGLEWVANIKQEGSEKYYVDSVKGRFTISRDNAKNSLYLQMNSLRAEDTAVYYCARDRAVAGAFDIWGQGTMVTVSSASTKGPSVFPLAPSSKSTSGGTAALGCLVKDYFPEPVTVSWNSGALTSGVHTFPAVLQSSGLYSLSSVVTVPSSSLGTQTYICNVNHKPSNTKVDKKVEPKSCDKTHTCPPCPAPELLGGPSVFLFPPKPKDTLMISRTPEVTCVVVDVSHEDPEVKFNWYVDGVEVHNAKTKPREEQYASTYRVVSVLTVLHQDWLNGKEYKCKVSNKALPAPIEKTISKAKGQPREPQVYTLPPSREEMTKNQVSLTCLVKGFYPSDIAVEWESNGQPENNYKTTPPVLDSDGSFFLYSKLTVDKSRWQQGNVFSCSVMHEALHNHYTQKSLSLSPGK

SEQ ID NO: 309 - protein, 451 aa, Artificial Sequence
  PR000274 HC
QVQLVQSGAEVKKPGSSVKVSCKASGGTFSNYWMHWVRQAPGQGLEWMGATYRGHSDTYYNQKFKGRVTITADKSTSTAYMELSSLRSEDTAVYYCARGAIYDGYDVLDNWGQGTLVTVSSASTKGPSVFPLAPSSKSTSGGTAALGCLVKDYFPEPVTVSWNSGALTSGVHTFPAVLQSSGLYSLSSVVTVPSSSLGTQTYICNVNHKPSNTKVDKKVEPKSCDKTHTCPPCPAPELLGGPSVFLFPPKPKDTLMISRTPEVTCVVVDVSHEDPEVKFNWYVDGVEVHNAKTKPREEQYNSTYRVVSVLTVLHQDWLNGKEYKCKVSNKALPAPIEKTISKAKGQPREPQVYTLPPSREEMTKNQVSLTCLVKGFYPSDIAVEWESNGQPENNYKTTPPVLDSDGSFFLYSKLTVDKSRWQQGNVFSCSVMHEALHNHYTQKSLSLSPGK

SEQ ID NO: 310 - protein, 449 aa, Artificial Sequence
  PR000416 HC, PR001574 Chain
EVQLVESGGGLVQPGGSLRLSCAASGFTFSSYWMSWVRQAPGKGLEWVANIKQEGSEKYYVDSVKGRFTISRDNAKNSLYLQMNSLRAEDTAVYYCARDRAVAGAFDIWGQGTMVTVSSASTKGPSVFPLAPSSKSTSGGTAALGCLVKDYFPEPVTVSWNSGALTSGVHTFPAVLQSSGLYSLSSVVTVPSSSLGTQTYICNVNHKPSNTKVDKKVEPKSCDKTHTCPPCPAPELLGGPSVFLFPPKPKDTLMISRTPEVTCVVVDVSHEDPEVKFNWYVDGVEVHNAKTKPREEQYNSTYRVVSVLTVLHQDWLNGKEYKCKVSNKALPAPIEKTISKAKGQPREPQVYTLPPSREEMTKNQVSLTCLVKGFYPSDIAVEWESNGQPENNYKTTPPVLDSDGSFFLYSKLTVDKSRWQQGNVFSCSVMHEALHNHYTQKSLSLSPGK

SEQ ID NO: 311 - protein, 442 aa, Artificial Sequence
  PR000448 HC
QVQLQQWGAGLLKPSETLSLTCAVYGGSFSGYYWSWIRQPPGKGLEWIGEIQHSGSTDSNPSLKGRVTFSVDTSKNQFSLKLNSVTAADTAVYYCARLTGPFDYWGQGTLVTVSSASTKGPSVFPLAPCSRSTSESTAALGCLVKDYFPEPVTVSWNSGALTSGVHTFPAVLQSSGLYSLSSVVTVPSSSLGTKTYTCNVDHKPSNTKVDKRVESKYGPPCPPCPAPEFLGGPSVFLFPPKPKDTLMISRTPEVTCVVVDVSQEDPEVQFNWYVDGVEVHNAKTKPREEQFNSTYRVVSVLTVLHQDWLNGKEYKCKVSNKGLPSSIEKTISKAKGQPREPQVYTLPPSQEEMTKNQVSLTCLVKGFYPSDIAVEWESNGQPENNYKTTPPVLDSDGSFFLYSRLTVDKSRWQEGNVFSCSVMHEALHNHYTQKSLSLSLGK

SEQ ID NO: 312 - protein, 442 aa, Artificial Sequence
  PR000483 HC
EVQLVQSGAEVKKPGESLRISCKGSGYSFSTYWISWVRQMPGKGLEWMGKIYPGDSYTNYSPSFQGQVTISADKSISTAYLQWSSLKASDTAMYYCARGYGIFDYWGQGTLVTVSSASTKGPSVFPLAPCSRSTSESTAALGCLVKDYFPEPVTVSWNSGALTSGVHTFPAVLQSSGLYSLSSVVTVPSSNFGTQTYTCNVDHKPSNTKVDKTVERKCCVECPPCPAPPVAGPSVFLFPPKPKDTLMISRTPEVTCVVVDVSHEDPEVQFNWYVDGVEVHNAKTKPREEQFNSTFRVVSVLTVVHQDWLNGKEYKCKVSNKGLPAPIEKTISKTKGQPREPQVYTLPPSREEMTKNQVSLTCLVKGFYPSDIAVEWESNGQPENNYKTTPPMLDSDGSFFLYSKLTVDKSRWQQGNVFSCSVMHEALHNHYTQKSLSLSPGK

SEQ ID NO: 313 - protein, 455 aa, Artificial Sequence
  PR000511 HC
EVQLLESGGGLVQPGGSLRLSCAASGFTFNTYAMNWVRQAPGKGLEWVSRIRSKYNNYATYYADSVKDRFTISRDDSKSTLYLQMNSLRAEDTAVYYCVRHGNFGNSYVSWFAYWGQGTLVTVSSASTKGPSVFPLAPSSKSTSGGTAALGCLVKDYFPEPVTVSWNSGALTSGVHTFPAVLQSSGLYSLSSVVTVPSSSLGTQTYICNVNHKPSNTKVDKKVEPKSCDKTHTCPPCPAPEAAGGPSVFLFPPKPKDTLMISRTPEVTCVVVDVSHEDPEVKFNWYVDGVEVHNAKTKPREEQYNSTYRVVSVLTVLHQDWLNGKEYKCKVSNKALPAPIEKTISKAKGQPREPQVYTLPPSREEMTKNQVSLTCLVKGFYPSDIAVEWESNGQPENNYKTTPPVLDSDGSFFLYSKLTVDKSRWQQGNVFSCSVMHEALHNHYTQKSLSLSPGK

SEQ ID NO: 314 - protein, 448 aa, Artificial Sequence
  PR000628 HC
QVQLQQWGAGLLKPSETLSLTCAVYGGSFSGYYWSWIRQSPEKGLEWIGEINHGGYVTYNPSLESRVTISVDTSKNQFSLKLSSVTAADTAVYYCARDYGPGNYDWYFDLWGRGTLVTVSSASTKGPSVFPLAPCSRSTSESTAALGCLVKDYFPEPVTVSWNSGALTSGVHTFPAVLQSSGLYSLSSVVTVPSSSLGTKTYTCNVDHKPSNTKVDKRVESKYGPPCPPCPAPEFLGGPSVFLFPPKPKDTLMISRTPEVTCVVVDVSQEDPEVQFNWYVDGVEVHNAKTKPREEQFNSTYRVVSVLTVLHQDWLNGKEYKCKVSNKGLPSSIEKTISKAKGQPREPQVYTLPPSQEEMTKNQVSLTCLVKGFYPSDIAVEWESNGQPENNYKTTPPVLDSDGSFFLYSRLTVDKSRWQEGNVFSCSVMHEALHNHYTQKSLSLSLGK

SEQ ID NO: 315 - protein, 449 aa, Artificial Sequence
  PR000672 HC, PR001589 Chain
EVQLVESGGGLVQPGGSLRLSCAASGFTFTDYTMDWVRQAPGKGLEWVADVNPNSGGSIYNQRFKGRFTLSVDRSKNTLYLQMNSLRAEDTAVYYCARNLGPSFYFDYWGQGTLVTVSSASTKGPSVFPLAPSSKSTSGGTAALGCLVKDYFPEPVTVSWNSGALTSGVHTFPAVLQSSGLYSLSSVVTVPSSSLGTQTYICNVNHKPSNTKVDKKVEPKSCDKTHTCPPCPAPELLGGPSVFLFPPKPKDTLMISRTPEVTCVVVDVSHEDPEVKFNWYVDGVEVHNAKTKPREEQYNSTYRVVSVLTVLHQDWLNGKEYKCKVSNKALPAPIEKTISKAKGQPREPQVYTLPPSREEMTKNQVSLTCLVKGFYPSDIAVEWESNGQPENNYKTTPPVLDSDGSFFLYSKLTVDKSRWQQGNVFSCSVMHEALHNHYTQKSLSLSPGK

SEQ ID NO: 316 - protein, 354 aa, Artificial Sequence
  PR000940 HC
EVQLLESGGGLVQPGGSLRLSCAASGFTFSSYAMIWVRQAPGKGLEWVSGISESGGSTYYADSVKGRFTISRDNSKNTLYLQMNSLRAEDTAVYFCVKDLDDILTGYYKDYWGQGTLVTVSSEPKSCDKTHTCPPCPAPELLGGPSVFLFPPKPKDTLMISRTPEVTCVVVDVSHEDPEVKFNWYVDGVEVHNAKTKPREEQYNSTYRVVSVLTVLHQDWLNGKEYKCKVSNKALPAPIEKTISKAKGQPREPQVYTLPPSREEMTKNQVSLTCLVKGFYPSDIAVEWESNGQPENNYKTTPPVLDSDGSFFLYSKLTVDKSRWQQGNVFSCSVMHEALHNHYTQKSLSLSPGK

SEQ ID NO: 317 - protein, 352 aa, Artificial Sequence
  PR000943 HC
EVQLVETGGGLIQPGGSLRLSCAASGFPVSSNYMSWVRQAPGKGLEWVSVIFSGGRTYYADSVKGRFTISRDNSKNTLYLQMNSLRAEDTAVYYCARRNWIDGRDAFDIWGQGTMVTVSSEPKSCDKTHTCPPCPAPELLGGPSVFLFPPKPKDTLMISRTPEVTCVVVDVSHEDPEVKFNWYVDGVEVHNAKTKPREEQYNSTYRVVSVLTVLHQDWLNGKEYKCKVSNKALPAPIEKTISKAKGQPREPQVYTLPPSREEMTKNQVSLTCLVKGFYPSDIAVEWESNGQPENNYKTTPPVLDSDGSFFLYSKLTVDKSRWQQGNVFSCSVMHEALHNHYTQKSLSLSPGK

SEQ ID NO: 318 - protein, 352 aa, Artificial Sequence
  PR001035 HC
EVQLVETGGGLIQPGGSLRLSCAASGFTVSSNYMTWVRQAPGKGLEWVSVIFSGGSTYYADSVKGRFTISRDNSKNTLYLQMNSLRAEDTAVYYCARRIAVAGHDVFDIWGQGTMVTVSSEPKSCDKTHTCPPCPAPELLGGPSVFLFPPKPKDTLMISRTPEVTCVVVDVSHEDPEVKFNWYVDGVEVHNAKTKPREEQYNSTYRVVSVLTVLHQDWLNGKEYKCKVSNKALPAPIEKTISKAKGQPREPQVYTLPPSREEMTKNQVSLTCLVKGFYPSDIAVEWESNGQPENNYKTTPPVLDSDGSFFLYSKLTVDKSRWQQGNVFSCSVMHEALHNHYTQKSLSLSPGK

SEQ ID NO: 319 - protein, 354 aa, Artificial Sequence
  PR001046 HC
EVQLVETGGGLIQPGGSLRLSCAASGFTVSDNYMTWVRQAPGKGLEWVSVIFSGGNTYYADSVKGRFTISRDNAKNTLYLQMNSLRAEDTALYYCARRNYDDTRGTDVFDIWGQGTMVTVSSEPKSCDKTHTCPPCPAPELLGGPSVFLFPPKPKDTLMISRTPEVTCVVVDVSHEDPEVKFNWYVDGVEVHNAKTKPREEQYNSTYRVVSVLTVLHQDWLNGKEYKCKVSNKALPAPIEKTISKAKGQPREPQVYTLPPSREEMTKNQVSLTCLVKGFYPSDIAVEWESNGQPENNYKTTPPVLDSDGSFFLYSKLTVDKSRWQQGNVFSCSVMHEALHNHYTQKSLSLSPGK

SEQ ID NO: 320 - protein, 356 aa, Artificial Sequence
  PR001758 HC
EVQLLESGGGLVQLGGSLRLSCAASGFTFSRYAMTWVRQAPEKGLEWVSSISGSGDDTYYGDSVKGRFTISRDNSQNTVYLQMNSLRAEDTAVYFCAKEKAGTTGDYYYNVDVWGQGTTVTVSSEPKSCDKTHTCPPCPAPELLGGPSVFLFPPKPKDTLMISRTPEVTCVVVDVSHEDPEVKFNWYVDGVEVHNAKTKPREEQYNSTYRVVSVLTVLHQDWLNGKEYKCKVSNKALPAPIEKTISKAKGQPREPQVYTLPPSREEMTKNQVSLTCLVKGFYPSDIAVEWESNGQPENNYKTTPPVLDSDGSFFLYSKLTVDKSRWQQGNVFSCSVMHEALHNHYTQKSLSLSPGK

SEQ ID NO: 321 - protein, 356 aa, Artificial Sequence
  PR001760 HC
EVQLVESGGGVVQPGGSLRLSCAASGFTFSNYAMTWVRQAPEKGLEWVSSISGSGVSTYYADSVKGRFTISRDNSKNTLYLQMTRLTAEDTAVYFCAKEGSSETDDHYYNVDVWGQGTTVTVSSEPKSCDKTHTCPPCPAPELLGGPSVFLFPPKPKDTLMISRTPEVTCVVVDVSHEDPEVKFNWYVDGVEVHNAKTKPREEQYNSTYRVVSVLTVLHQDWLNGKEYKCKVSNKALPAPIEKTISKAKGQPREPQVYTLPPSREEMTKNQVSLTCLVKGFYPSDIAVEWESNGQPENNYKTTPPVLDSDGSFFLYSKLTVDKSRWQQGNVFSCSVMHEALHNHYTQKSLSLSPGK

SEQ ID NO: 322 - protein, 356 aa, Artificial Sequence
  PR001771 HC
EVQLLESGGGLVQPGGSLRLSCAASGFTFSNYAMTWVRQPPGKGLEWVSSISGSGGSTYYADSVKGRFTISRDNSKNTLYLQMNSLRAEDTAVYYCAKEGTGTTSDYYYNVDVWGQGTTVTVSSEPKSCDKTHTCPPCPAPELLGGPSVFLFPPKPKDTLMISRTPEVTCVVVDVSHEDPEVKFNWYVDGVEVHNAKTKPREEQYNSTYRVVSVLTVLHQDWLNGKEYKCKVSNKALPAPIEKTISKAKGQPREPQVYTLPPSREEMTKNQVSLTCLVKGFYPSDIAVEWESNGQPENNYKTTPPVLDSDGSFFLYSKLTVDKSRWQQGNVFSCSVMHEALHNHYTQKSLSLSPGK

SEQ ID NO: 323 - protein, 356 aa, Artificial Sequence
  PR001836 HC
EVQLLESGGGLVQPGGSLRLSCAASGFIFSNFAMTWVRQPPEKGLKWVSSINGSGFNTYYTDSVKGRFTISRDNSRNTLYLQMNRLTAEDTAVYFCAKEGSSETDDHYYNVDVWGQGTTVTVSSEPKSCDKTHTCPPCPAPELLGGPSVFLFPPKPKDTLMISRTPEVTCVVVDVSHEDPEVKFNWYVDGVEVHNAKTKPREEQYNSTYRVVSVLTVLHQDWLNGKEYKCKVSNKALPAPIEKTISKAKGQPREPQVYTLPPSREEMTKNQVSLTCLVKGFYPSDIAVEWESNGQPENNYKTTPPVLDSDGSFFLYSKLTVDKSRWQQGNVFSCSVMHEALHNHYTQKSLSLSPGK

SEQ ID NO: 324 - protein, 355 aa, Artificial Sequence
  PR001840 HC
EVQLVESGGGLVQPGGSLRLSCAASGFTFSSYWMHWVRQAPGKGLVWVSRINSDGSSTSYADSVQGRFTISRDNAKNTLYLQMNSLRAEDTAVYYCVRKGSSSYYHYSIEDDWGQGTLVTVSSEPKSCDKTHTCPPCPAPELLGGPSVFLFPPKPKDTLMISRTPEVTCVVVDVSHEDPEVKFNWYVDGVEVHNAKTKPREEQYNSTYRVVSVLTVLHQDWLNGKEYKCKVSNKALPAPIEKTISKAKGQPREPQVYTLPPSREEMTKNQVSLTCLVKGFYPSDIAVEWESNGQPENNYKTTPPVLDSDGSFFLYSKLTVDKSRWQQGNVFSCSVMHEALHNHYTQKSLSLSPGK

SEQ ID NO: 325 - protein, 455 aa, Artificial Sequence
  PR001848 HC
EVQLLESGGGLVQPGGSLRLSCAASGFTFSTYAMNWVRQAPGKGLEWVSRIRSKYNNYATYYADSVKDRFTISRDDSKSTLYLQMNSLRAEDTAVYYCVRHGNFGNSYVSWFAYWGQGTLVTVSSASTKGPSVFPLAPSSKSTSGGTAALGCLVKDYFPEPVTVSWNSGALTSGVHTFPAVLQSSGLYSLSSVVTVPSSSLGTQTYICNVNHKPSNTKVDKKVEPKSCDKTHTCPPCPAPEAAGGPSVFLFPPKPKDTLMISRTPEVTCVVVDVSHEDPEVKFNWYVDGVEVHNAKTKPREEQYNSTYRVVSVLTVLHQDWLNGKEYKCKVSNKALGAPIEKTISKAKGQPREPQVYTLPPSREEMTKNQVSLTCLVKGFYPSDIAVEWESNGQPENNYKTTPPVLDSDGSFFLYSKLTVDKSRWQQGNVFSCSVMHEALHNHYTQKSLSLSPGK

SEQ ID NO: 326 - protein, 449 aa, Artificial Sequence
  PR002408 HC
QVQLVESGGGVVQPGRSLRLSCAASGFTFRSFGMHWVRQAPGKGLEWVAVISYDASNEYYADSVKGRFIISRDNSKDTLYLQMNSLRAGDTAVYYCAKGGGLRWYFAYWGQGTLVTVSSASTKGPSVFPLAPSSKSTSGGTAALGCLVKDYFPEPVTVSWNSGALTSGVHTFPAVLQSSGLYSLSSVVTVPSSSLGTQTYICNVNHKPSNTKVDKKVEPKSCDKTHTCPPCPAPELLGGPSVFLFPPKPKDTLMISRTPEVTCVVVDVSHEDPEVKFNWYVDGVEVHNAKTKPREEQYNSTYRVVSVLTVLHQDWLNGKEYKCKVSNKALPAPIEKTISKAKGQPREPQVYTLPPSREEMTKNQVSLTCLVKGFYPSDIAVEWESNGQPENNYKTTPPVLDSDGSFFLYSKLTVDKSRWQQGNVFSCSVMHEALHNHYTQKSLSLSPGK

SEQ ID NO: 327 - protein, 446 aa, Artificial Sequence
  PR002410 HC
QVQLVQSGAEVKKPGSSMRVSCKASEDTFSSYAISWVRQAPGQGLEWMGGTAPIFGTTNYAQKFQGRVTITADKSTSTAYMELSSLRSEDTAVYYCARGGPYFDYWGQGTLVTVSSASTKGPSVFPLAPSSKSTSGGTAALGCLVKDYFPEPVTVSWNSGALTSGVHTFPAVLQSSGLYSLSSVVTVPSSSLGTQTYICNVNHKPSNTKVDKKVEPKSCDKTHTCPPCPAPELLGGPSVFLFPPKPKDTLMISRTPEVTCVVVDVSHEDPEVKFNWYVDGVEVHNAKTKPREEQYNSTYRVVSVLTVLHQDWLNGKEYKCKVSNKALPAPIEKTISKAKGQPREPQVYTLPPSREEMTKNQVSLTCLVKGFYPSDIAVEWESNGQPENNYKTTPPVLDSDGSFFLYSKLTVDKSRWQQGNVFSCSVMHEALHNHYTQKSLSLSPGK

SEQ ID NO: 328 - protein, 455 aa, Artificial Sequence
  PR003886 HC
EVQLVESGGGLVQPGGSLKLSCAASGFTFSTYAMNWVRQASGKGLEWVGRIRSKYNNYATYYADSVKDRFTISRDDSKNTAYLQMNSLKTEDTAVYYCTRHGNFGNSYVSWFAYWGQGTLVTVSSASTKGPSVFPLAPSSKSTSGGTAALGCLVKDYFPEPVTVSWNSGALTSGVHTFPAVLQSSGLYSLSSVVTVPSSSLGTQTYICNVNHKPSNTKVDKKVEPKSCDKTHTCPPCPAPEAAGGPSVFLFPPKPKDTLMISRTPEVTCVVVDVSHEDPEVKFNWYVDGVEVHNAKTKPREEQYNSTYRVVSVLTVLHQDWLNGKEYKCKVSNKALPAPIEKTISKAKGQPREPQVYTLPPSREEMTKNQVSLTCLVKGFYPSDIAVEWESNGQPENNYKTTPPVLDSDGSFFLYSKLTVDKSRWQQGNVFSCSVMHEALHNHYTQKSLSLSPGK

SEQ ID NO: 329 - protein, 356 aa, Artificial Sequence
  PR004469 HC
EVQLLESGGGLVQPGGSLRLSCAASGFTFSNYAMSWFRQPPETGLKWVSSIDASGGDTYYADSVKGRFTISRDNSKNTLYLQMNSLRAEDTAVYYCAKEGSHGTDDSHYDVDVWGQGTTVTVSSEPKSCDKTHTCPPCPAPELLGGPSVFLFPPKPKDTLMISRTPEVTCVVVDVSHEDPEVKFNWYVDGVEVHNAKTKPREEQYNSTYRVVSVLTVLHQDWLNGKEYKCKVSNKALPAPIEKTISKAKGQPREPQVYTLPPSREEMTKNQVSLTCLVKGFYPSDIAVEWESNGQPENNYKTTPPVLDSDGSFFLYSKLTVDKSRWQQGNVFSCSVMHEALHNHYTQKSLSLSPGK

SEQ ID NO: 330 - protein, 150 aa, Artificial Sequence
  PR004559 HC
EVQLVETGGGLIQPGGSLRLSCAASGFTVSDNYMTWVRQAPGKGLEWVSVIFSGGKTYYADSVKGRFTISRDNAKNTLYLQMNSLRAEDTALYYCARRNYDDTRGTDVFDIWGQGTMVTVSSGHRGQGGSDYKDDDDKEFGSHHHHHHHH

SEQ ID NO: 331 - protein, 150 aa, Artificial Sequence
  PR004560 HC
EVQLVETGGGLIQPGGSLRLSCAASGFTVSDAYMTWVRQAPGKGLEWVSVIFSGGNTYVSDSVKGRFTISRDNAKNTLYLQMNSLRAEDTALYYCARRNYDQTRGTDVFDIWGQGTMVTVSSGHRGQGGSDYKDDDDKEFGSHHHHHHHH

SEQ ID NO: 332 - protein, 150 aa, Artificial Sequence
  PR004561 HC
EVQLVETGGGLIQPGGSLRLSCAASGFTVSDSYMTWVRQAPGKGLEWVSVIFSGGNTYYADSVKGRFTISRDNAKNTLYLQMNSLRAEDTALYYCARRNYDQTLGTDVFDIWGQGTMVTVSSGHRGQGGSDYKDDDDKEFGSHHHHHHHH

SEQ ID NO: 333 - protein, 150 aa, Artificial Sequence
  PR004562 HC
EVQLVETGGGLIQPGGSLRLSCAASGFTVSDSYMTWVRQAPGKGLEWVSVIFSGGKTYYSDSVKGRFTISRDNAKNTLYLQMNSLRAEDTALYYCARRNYDQTLGTDVFDIWGQGTMVTVSSGHRGQGGSDYKDDDDKEFGSHHHHHHHH

SEQ ID NO: 334 - protein, 150 aa, Artificial Sequence
  PR004563 HC
EVQLVETGGGLIQPGGSLRLSCAASGFTVYDNYMTWVRQAPGKGLEWVSVIFSGGKTYVADSVKGRFTISRDNAKNTLYLQMNSLRAEDTALYYCARRNYDQTRGTDVFDIWGQGTMVTVSSGHRGQGGSDYKDDDDKEFGSHHHHHHHH

SEQ ID NO: 335 - protein, 150 aa, Artificial Sequence
  PR004564 HC
EVQLVETGGGLIQPGGSLRLSCAASGFTVSDSYMTWVRQAPGKGLEWVSVIFSGGRTYYSDSVKGRFTISRDNAKNTLYLQMNSLRAEDTALYYCARRNYDQTLGTDVFDIWGQGTMVTVSSGHRGQGGSDYKDDDDKEFGSHHHHHHHH

SEQ ID NO: 336 - protein, 150 aa, Artificial Sequence
  PR004565 HC
EVQLVETGGGLIQPGGSLRLSCAASGFTVSDAYMTWVRQAPGKGLEWVSVIFSGGNTYVSDSVKGRFTISRDNAKNTLYLQMNSLRAEDTALYYCARRNYDQTIGTDVFDIWGQGTMVTVSSGHRGQGGSDYKDDDDKEFGSHHHHHHHH

SEQ ID NO: 337 - protein, 150 aa, Artificial Sequence
  PR004566 HC
EVQLVETGGGLIQPGGSLRLSCAASGFTVSDSYMTWVRQAPGKGLEWVSVIFSGGRTYYSDSVKGRFTISRDNAKNTLYLQMNSLRAEDTALYYCARRNYDDTRGTDVFDIWGQGTMVTVSSGHRGQGGSDYKDDDDKEFGSHHHHHHHH

SEQ ID NO: 338 - protein, 150 aa, Artificial Sequence
  PR004567 HC
EVQLVETGGGLIQPGGSLRLSCAASGFTVSDSYMTWVRQAPGKGLEWVSVIFSGGKTYVADSVKGRFTISRDNAKNTLYLQMNSLRAEDTALYYCARRNYDQTRGTDVFDIWGQGTMVTVSSGHRGQGGSDYKDDDDKEFGSHHHHHHHH

SEQ ID NO: 339 - protein, 150 aa, Artificial Sequence
  PR004568 HC
EVQLVETGGGLIQPGGSLRLSCAASGFTVSDAYMTWVRQAPGKGLEWVSVIFSGGRTYVADSVKGRFTISRDNAKNTLYLQMNSLRAEDTALYYCARRNYDDTRGTDVFDIWGQGTMVTVSSGHRGQGGSDYKDDDDKEFGSHHHHHHHH

SEQ ID NO: 340 - protein, 150 aa, Artificial Sequence
  PR004569 HC
EVQLVETGGGLIQPGGSLRLSCAASGFTVSDSYMTWVRQAPGKGLEWVSVIFSGGRTYYSDSVKGRFTISRDNAKNTLYLQMNSLRAEDTALYYCARRNYDQTRGTDVFDIWGQGTMVTVSSGHRGQGGSDYKDDDDKEFGSHHHHHHHH

SEQ ID NO: 341 - protein, 150 aa, Artificial Sequence
  PR004570 HC
EVQLVETGGGLIQPGGSLRLSCAASGFTVSDAYMTWVRQAPGKGLEWVSVIFSGGRTYYADSVKGRFTISRDNAKNTLYLQMNSLRAEDTALYYCARRNYDQTRGTDVFDIWGQGTMVTVSSGHRGQGGSDYKDDDDKEFGSHHHHHHHH

SEQ ID NO: 342 - protein, 150 aa, Artificial Sequence
  PR004571 HC
EVQLVETGGGLIQPGGSLRLSCAASGFTVSDSYMTWVRQAPGKGLEWVSVIFSGGKTYYSDSVKGRFTISRDNAKNTLYLQMNSLRAEDTALYYCARRNYDQTIGTDVFDIWGQGTMVTVSSGHRGQGGSDYKDDDDKEFGSHHHHHHHH

SEQ ID NO: 343 - protein, 150 aa, Artificial Sequence
  PR004572 HC
EVQLVETGGGLIQPGGSLRLSCAASGFTVSDSYMTWVRQAPGKGLEWVSVIFSGGKTYVADSVKGRFTISRDNAKNTLYLQMNSLRAEDTALYYCARRNYDDTRGTDVFDIWGQGTMVTVSSGHRGQGGSDYKDDDDKEFGSHHHHHHHH

SEQ ID NO: 344 - protein, 150 aa, Artificial Sequence
  PR004573 HC
EVQLVETGGGLIQPGGSLRLSCAASGFTVSDSYMTWVRQAPGKGLEWVSVIFSGGKTYYADSVKGRFTISRDNAKNTLYLQMNSLRAEDTALYYCARRNYDDTRGTDVFDIWGQGTMVTVSSGHRGQGGSDYKDDDDKEFGSHHHHHHHH

SEQ ID NO: 345 - protein, 150 aa, Artificial Sequence
  PR004574 HC
EVQLVETGGGLIQPGGSLRLSCAASGFTVSDAYMTWVRQAPGKGLEWVSVIFSGGRTYYSDSVKGRFTISRDNAKNTLYLQMNSLRAEDTALYYCARRNYDQTRGTDVFDIWGQGTMVTVSSGHRGQGGSDYKDDDDKEFGSHHHHHHHH

SEQ ID NO: 346 - protein, 455 aa, Artificial Sequence
  PR004616 HC
EVQLLESGGGLVQPGGSLRLSCAASGFTFSTYAMNWVRQAPGKGLEWVSRIRSKYNNYATYYADSVKDRFTISRDNSKNTLYLQMNSLRAEDTAVYYCAKHGNFGNSYVSWFAYWGQGTLVTVSSASTKGPSVFPLAPSSKSTSGGTAALGCLVKDYFPEPVTVSWNSGALTSGVHTFPAVLQSSGLYSLSSVVTVPSSSLGTQTYICNVNHKPSNTKVDKKVEPKSCDKTHTCPPCPAPEAAGGPSVFLFPPKPKDTLMISRTPEVTCVVVDVSHEDPEVKFNWYVDGVEVHNAKTKPREEQYNSTYRVVSVLTVLHQDWLNGKEYKCKVSNKALPAPIEKTISKAKGQPREPQVYTLPPSREEMTKNQVSLTCLVKGFYPSDIAVEWESNGQPENNYKTTPPVLDSDGSFFLYSKLTVDKSRWQQGNVFSCSVMHEALHNHYTQKSLSLSPGK

SEQ ID NO: 347 - protein, 215 aa, Artificial Sequence
  PR000070 LC
SDIQMTQSPSTLSASVGDRVTVTCRASQSIYIWLAWYQQKPGKAPNLLIYKASSLETGVPSRFSGSGSGTEFTLTISSLQPDDFATYYCQQYYGSSRTFGQGTKVEIKRTVAAPSVFIFPPSDEQLKSGTASVVCLLNNFYPREAKVQWKVDNALQSGNSQESVTEQDSKDSTYSLSSTLTLSKADYEKHKVYACEVTHQGLSSPVTKSFNRGEC

SEQ ID NO: 348 - protein, 215 aa, Artificial Sequence
  PR000149 LC
EIVLTQSPGTLSLSPGERATLSCRASQSVGSSYLAWYQQKPGQAPRLLIYGAFSRATGIPDRFSGSGSGTDFTLTISRLEPEDFAVYYCQQYGSSPWTFGQGTKVEIKRTVAAPSVFIFPPSDEQLKSGTASVVCLLNNFYPREAKVQWKVDNALQSGNSQESVTEQDSKDSTYSLSSTLTLSKADYEKHKVYACEVTHQGLSSPVTKSFNRGEC

SEQ ID NO: 349 - protein, 214 aa, Artificial Sequence
  PR000151 LC
DIQMTQSPSSLSASVGDRVTITCRASQDVSTAVAWYQQKPGKAPKLLIYSASFLYSGVPSRFSGSGSGTDFTLTISSLQPEDFATYYCQQYLYHPATFGQGTKVEIKRTVAAPSVFIFPPSDEQLKSGTASVVCLLNNFYPREAKVQWKVDNALQSGNSQESVTEQDSKDSTYSLSSTLTLSKADYEKHKVYACEVTHQGLSSPVTKSFNRGEC

SEQ ID NO: 350 - protein, 214 aa, Artificial Sequence
  PR000197 LC
EFVMTQSPATLSVSPGERATLSCRASQSISSILAWYQQKPGQAPRLLIYGASTRATGIPARFSGSGSGTEFTLTISSLQSEDFAVYYCQQYYNWPLTFGGGTKVEIKRTVAAPSVFIFPPSDEQLKSGTASVVCLLNNFYPREAKVQWKVDNALQSGNSQESVTEQDSKDSTYSLSSTLTLSKADYEKHKVYACEVTHQGLSSPVTKSFNRGEC

SEQ ID NO: 351 - protein, 214 aa, Artificial Sequence
  PR000210 LC, PR000539 Chain, PR000540 Chain, PR000541 Chain, PR000542 Chain, PR000714 Chain, PR000715 Chain, PR000916 Chain, PR000917 Chain, PR001579 Chain, PR001580 Chain, PR001581 Chain, PR001582 Ch
DIQMTQSPSSLSASVGDRVTITCRASQDVNTAVAWYQQKPGKAPKLLIYSASFLYSGVPSRFSGSRSGTDFTLTISSLQPEDFATYYCQQHYTTPPTFGQGTKVEIKRTVAAPSVFIFPPSDEQLKSGTASVVCLLNNFYPREAKVQWKVDNALQSGNSQESVTEQDSKDSTYSLSSTLTLSKADYEKHKVYACEVTHQGLSSPVTKSFNRGEC

SEQ ID NO: 352 - protein, 215 aa, Artificial Sequence
  PR000260 LC
QAVVTQESALTTSPGETVTLTCRSSTGAVTTSNYANWVQEKPDHLFTGLIGGTNKRAPGVPARFSGSLIGDKAALTITGAQTEDEAIYFCALWYSNLWVFGGGTKLTVLGQPKAAPSVTLFPPSSEELQANKATLVCLISDFYPGAVTVAWKADSSPVKAGVETTTPSKQSNNKYAASSYLSLTPEQWKSHRSYSCQVTHEGSTVEKTVAPTECS

SEQ ID NO: 353 - protein, 214 aa, Artificial Sequence
  PR000265 LC, PR000300 Chain, PR000303 Chain, PR000401 Chain, PR000402 Chain, PR000416 LC, PR001573 Chain, PR001576 Chain, PR001609 Chain, PR001610 Chain, PR003549 Chain, PR003550 Chain, PR003551 Chain
DIQMTQSPSTLSASVGDRVTVTCRASQSIYIWLAWYQQKPGKAPNLLIYKASSLETGVPSRFSGSGSGTEFTLTISSLQPDDFATYYCQQYYGSSRTFGQGTKVEIKRTVAAPSVFIFPPSDEQLKSGTASVVCLLNNFYPREAKVQWKVDNALQSGNSQESVTEQDSKDSTYSLSSTLTLSKADYEKHKVYACEVTHQGLSSPVTKSFNRGEC

SEQ ID NO: 354 - protein, 214 aa, Artificial Sequence
  PR000274 LC
DIQMTQSPSSLSASVGDRVTITCSASQDISNYLNWYQQKPGKAPKLLIYYTSNLHSGVPSRFSGSGSGTDFTLTISSLQPEDFATYYCQQYRKLPWTFGQGTKLEIKRTVAAPSVFIFPPSDEQLKSGTASVVCLLNNFYPREAKVQWKVDNALQSGNSQESVTEQDSKDSTYSLSSTLTLSKADYEKHKVYACEVTHQGLSSPVTKSFNRGEC

SEQ ID NO: 355 - protein, 214 aa, Artificial Sequence
  PR000448 LC, PR000701 Chain, PR003052 Chain
EIVMTQSPATLSVSPGERATLSCRASQSISSILAWYQQKPGQAPRLLIYGASTRATGIPARFSGSGSGTEFTLTISSLQSEDFAVYYCQQYYNWPLTFGGGTKVEIKRTVAAPSVFIFPPSDEQLKSGTASVVCLLNNFYPREAKVQWKVDNALQSGNSQESVTEQDSKDSTYSLSSTLTLSKADYEKHKVYACEVTHQGLSSPVTKSFNRGEC

SEQ ID NO: 356 - protein, 214 aa, Artificial Sequence
  PR000483 LC
SYELTQPPSVSVSPGQTASITCSGDNIGDQYAHWYQQKPGQSPVLVIYQDKNRPSGIPERFSGSNSGNTATLTISGTQAMDEADYYCATYTGFGSLAVFGGGTKLTVLGQPKAAPSVTLFPPSSEELQANKATLVCLISDFYPGAVTVAWKADSSPVKAGVETTTPSKQSNNKYAASSYLSLTPEQWKSHRSYSCQVTHEGSTVEKTVAPTECS

SEQ ID NO: 357 - protein, 215 aa, Artificial Sequence
  PR000511 LC, PR001848 LC, PR001987 Chain, PR001988 Chain, PR001989 Chain, PR001990 Chain, PR002299 Chain, PR002300 Chain, PR002301 Chain, PR002308 Chain, PR002309 Chain, PR002310 Chain, PR002313 Chain
QAVVTQEPSLTVSPGGTVTLTCRSSTGAVTTSNYANWVQQKPGQAPRGLIGGTNKRAPWTPARFSGSLLGDKAALTLLGAQPEDEAEYFCALWYSNLWVFGGGTKLTVLGQPKAAPSVTLFPPSSEELQANKATLVCLISDFYPGAVTVAWKADSSPVKAGVETTTPSKQSNNKYAASSYLSLTPEQWKSHRSYSCQVTHEGSTVEKTVAPTECS

SEQ ID NO: 358 - protein, 216 aa, Artificial Sequence
  PR000628 LC
EIVLTQSPATLSLSPGERATLSCRASQSVSSYLAWYQQKPGQAPRLLIYDASNRATGIPARFSGSGSGTDFTLTISSLEPEDFAVYYCQQRSNWPPALTFGGGTKVEIKRTVAAPSVFIFPPSDEQLKSGTASVVCLLNNFYPREAKVQWKVDNALQSGNSQESVTEQDSKDSTYSLSSTLTLSKADYEKHKVYACEVTHQGLSSPVTKSFNRGEC

SEQ ID NO: 359 - protein, 214 aa, Artificial Sequence
  PR000672 LC, PR001588 Chain, PR001591 Chain
DIQMTQSPSSLSASVGDRVTITCKASQDVSIGVAWYQQKPGKAPKLLIYSASYRYTGVPSRFSGSGSGTDFTLTISSLQPEDFATYYCQQYYIYPYTFGQGTKVEIKRTVAAPSVFIFPPSDEQLKSGTASVVCLLNNFYPREAKVQWKVDNALQSGNSQESVTEQDSKDSTYSLSSTLTLSKADYEKHKVYACEVTHQGLSSPVTKSFNRGEC

SEQ ID NO: 360 - protein, 215 aa, Artificial Sequence
  PR002408 LC, PR003334 Chain, PR003335 Chain, PR003338 Chain, PR003487 Chain, PR003488 Chain, PR007165 Chain
EIVMTQSPATLSVSPGERATLSCRASQSISSNLGWYQQKPGQAPRLLIYGASTRATGIPARFSGSGSGTEFTLTISSLQSEDFAVYYCQQYQSWPPLTFGGGTKVEIKRTVAAPSVFIFPPSDEQLKSGTASVVCLLNNFYPREAKVQWKVDNALQSGNSQESVTEQDSKDSTYSLSSTLTLSKADYEKHKVYACEVTHQGLSSPVTKSFNRGEC

SEQ ID NO: 361 - protein, 214 aa, Artificial Sequence
  PR002410 LC, PR004160 Chain, PR004161 Chain, PR004181 Chain, PR004182 Chain
EIVMTQSPASLSVSPGERATLSCRASQSVSSNLAWYQQKPGQAPRLLIYGASTRATGIPARVSGGGSGTEFTLTISSLQSEDFAVYYCQQYKNWPFTFGPGTKLEIKRTVAAPSVFIFPPSDEQLKSGTASVVCLLNNFYPREAKVQWKVDNALQSGNSQESVTEQDSKDSTYSLSSTLTLSKADYEKHKVYACEVTHQGLSSPVTKSFNRGEC

SEQ ID NO: 362 - protein, 587 aa, Artificial Sequence
  PR000300 Chain, PR001572 Chain
EVQLVESGGGLIQPGGSLRLSCAVSGFTVSKNYMSWVRQAPGKGLEWVSVVYSGGSKTYADSVKGRFTISRDNSKNTLYLQMNSLRAEDTAVYYCARAVPHSPSSFDIWGQGTMVTVSSKLEPKSSDKTHTPPPPPRTEVQLVESGGGLVQPGGSLRLSCAASGFTFSSYWMSWVRQAPGKGLEWVANIKQDGSEKYYVDSVKGRFTISRDNAKNSLYLQMNSLRAEDTAVYYCARDRAVAGAFDIWGQGTMVTVSSASTKGPSVFPLAPSSKSTSGGTAALGCLVKDYFPEPVTVSWNSGALTSGVHTFPAVLQSSGLYSLSSVVTVPSSSLGTQTYICNVNHKPSNTKVDKKVEPKSCDKTHTCPPCPAPELLGGPSVFLFPPKPKDTLMISRTPEVTCVVVDVSHEDPEVKFNWYVDGVEVHNAKTKPREEQYNSTYRVVSVLTVLHQDWLNGKEYKCKVSNKALPAPIEKTISKAKGQPREPQVYTLPPSREEMTKNQVSLTCLVKGFYPSDIAVEWESNGQPENNYKTTPPVLDSDGSFFLYSKLTVDKSRWQQGNVFSCSVMHEALHNHYTQKSLSLSPGK

SEQ ID NO: 363 - protein, 352 aa, Artificial Sequence
  PR000301 Chain, PR001572 Chain, PR001574 Chain, PR001575 Chain, PR001577 Chain, PR001578 Chain
EVQLVESGGGLIQPGGSLRLSCAVSGFTVSKNYMSWVRQAPGKGLEWVSVVYSGGSKTYADSVKGRFTISRDNSKNTLYLQMNSLRAEDTAVYYCARAVPHSPSSFDIWGQGTMVTVSSKLEPKSSDKTHTPPPPPRTDIQMTQSPSTLSASVGDRVTVTCRASQSIYIWLAWYQQKPGKAPNLLIYKASSLETGVPSRFSGSGSGTEFTLTISSLQPDDFATYYCQQYYGSSRTFGQGTKVEIKRTVAAPSVFIFPPSDEQLKSGTASVVCLLNNFYPREAKVQWKVDNALQSGNSQESVTEQDSKDSTYSLSSTLTLSKADYEKHKVYACEVTHQGLSSPVTKSFNRGEC

SEQ ID NO: 364 - protein, 449 aa, Artificial Sequence
  PR000301 Chain, PR000302 Chain
EVQLVESGGGLVQPGGSLRLSCAASGFTFSSYWMSWVRQAPGKGLEWVANIKQDGSEKYYVDSVKGRFTISRDNAKNSLYLQMNSLRAEDTAVYYCARDRAVAGAFDIWGQGTMVTVSSASTKGPSVFPLAPSSKSTSGGTAALGCLVKDYFPEPVTVSWNSGALTSGVHTFPAVLQSSGLYSLSSVVTVPSSSLGTQTYICNVNHKPSNTKVDKKVEPKSCDKTHTCPPCPAPELLGGPSVFLFPPKPKDTLMISRTPEVTCVVVDVSHEDPEVKFNWYVDGVEVHNAKTKPREEQYNSTYRVVSVLTVLHQDWLNGKEYKCKVSNKALPAPIEKTISKAKGQPREPQVYTLPPSREEMTKNQVSLTCLVKGFYPSDIAVEWESNGQPENNYKTTPPVLDSDGSFFLYSKLTVDKSRWQQGNVFSCSVMHEALHNHYTQKSLSLSPGK

SEQ ID NO: 365 - protein, 348 aa, Artificial Sequence
  PR000302 Chain
DIQMTQSPSTLSASVGDRVTVTCRASQSIYIWLAWYQQKPGKAPNLLIYKASSLETGVPSRFSGSGSGTEFTLTISSLQPDDFATYYCQQYYGSSRTFGQGTKVEIKRTVAAPSVFIFPPSDEQLKSGTASVVCLLNNFYPREAKVQWKVDNALQSGNSQESVTEQDSKDSTYSLSSTLTLSKADYEKHKVYACEVTHQGLSSPVTKSFNRGECEPKSSDKTHTPPPPPEVQLVESGGGLIQPGGSLRLSCAVSGFTVSKNYMSWVRQAPGKGLEWVSVVYSGGSKTYADSVKGRFTISRDNSKNTLYLQMNSLRAEDTAVYYCARAVPHSPSSFDIWGQGTMVTVSS

SEQ ID NO: 366 - protein, 586 aa, Artificial Sequence
  PR000303 Chain
EVQLVESGGGLVQPGGSLRLSCAASGFTFSSYWMSWVRQAPGKGLEWVANIKQDGSEKYYVDSVKGRFTISRDNAKNSLYLQMNSLRAEDTAVYYCARDRAVAGAFDIWGQGTMVTVSSASTKGPSVFPLAPSSKSTSGGTAALGCLVKDYFPEPVTVSWNSGALTSGVHTFPAVLQSSGLYSLSSVVTVPSSSLGTQTYICNVNHKPSNTKVDKKVEPKSCDKTHTCPPCPAPELLGGPSVFLFPPKPKDTLMISRTPEVTCVVVDVSHEDPEVKFNWYVDGVEVHNAKTKPREEQYNSTYRVVSVLTVLHQDWLNGKEYKCKVSNKALPAPIEKTISKAKGQPREPQVYTLPPSREEMTKNQVSLTCLVKGFYPSDIAVEWESNGQPENNYKTTPPVLDSDGSFFLYSKLTVDKSRWQQGNVFSCSVMHEALHNHYTQKSLSLSPGKLEPKSSDKTHTPPPPPRTEVQLVESGGGLIQPGGSLRLSCAVSGFTVSKNYMSWVRQAPGKGLEWVSVVYSGGSKTYADSVKGRFTISRDNSKNTLYLQMNSLRAEDTAVYYCARAVPHSPSSFDIWGQGTMVTVSS

SEQ ID NO: 367 - protein, 223 aa, Artificial Sequence
  PR000305 Chain, PR000653 Chain, PR000654 Chain, PR000655 Chain, PR000656 Chain, PR000658 Chain, PR000659 Chain, PR000706 Chain, PR000716 Chain, PR000717 Chain, PR002670 Chain, PR002671 Chain, PR002672
EVQLVESGGGLVQPGGSLRLSCAASGFNIKDTYIHWVRQAPGKGLEWVARIYPTNGYTRYADSVKGRFTISADTSKNTAYLQMNSLRAEDTAVYYCSRWGGDGFYAMDYWGQGTLVTVSSASTKGPSVFPLAPSSKSTSGGTAALGCLVKDYFPEPVTVSWNSGALTSGVHTFPAVLQSSGLYSLSSVVTVPSSSLGTQTYICNVNHKPSNTKVDKKVEPKSC

SEQ ID NO: 368 - protein, 565 aa, Artificial Sequence
  PR000305 Chain
DIQMTQSPSSLSASVGDRVTITCRASQDVNTAVAWYQQKPGKAPKLLIYSASFLYSGVPSRFSGSRSGTDFTLTISSLQPEDFATYYCQQHYTTPPTFGQGTKVEIKRTVAAPSVFIFPPSDEQLKSGTASVVCLLNNFYPREAKVQWKVDNALQSGNSQESVTEQDSKDSTYSLSSTLTLSKADYEKHKVYACEVTHQGLSSPVTKSFNRGECEVQLVESGGGLIQPGGSLRLSCAVSGFTVSKNYMSWVRQAPGKGLEWVSVVYSGGSKTYADSVKGRFTISRDNSKNTLYLQMNSLRAEDTAVYYCARAVPHSPSSFDIWGQGTMVTVSSEPKSCDKTHTCPPCPAPELLGGPSVFLFPPKPKDTLMISRTPEVTCVVVDVSHEDPEVKFNWYVDGVEVHNAKTKPREEQYNSTYRVVSVLTVLHQDWLNGKEYKCKVSNKALPAPIEKTISKAKGQPREPQVYTLPPSREEMTKNQVSLTCLVKGFYPSDIAVEWESNGQPENNYKTTPPVLDSDGSFFLYSKLTVDKSRWQQGNVFSCSVMHEALHNHYTQKSLSLSPGK

SEQ ID NO: 369 - protein, 586 aa, Artificial Sequence
  PR000401 Chain
EVQLVESGGGLVQPGGSLRLSCAASGFTFSSYWMSWVRQAPGKGLEWVANIKQEGSEKYYVDSVKGRFTISRDNAKNSLYLQMNSLRAEDTAVYYCARDRAVAGAFDIWGQGTMVTVSSASTKGPSVFPLAPSSKSTSGGTAALGCLVKDYFPEPVTVSWNSGALTSGVHTFPAVLQSSGLYSLSSVVTVPSSSLGTQTYICNVNHKPSNTKVDKKVEPKSCDKTHTCPPCPAPEAAGGPSVFLFPPKPKDTLMISRTPEVTCVVVDVSHEDPEVKFNWYVDGVEVHNAKTKPREEQYNSTYRVVSVLTVLHQDWLNGKEYKCKVSNKALGAPIEKTISKAKGQPREPQVYTLPPSREEMTKNQVSLTCLVKGFYPSDIAVEWESNGQPENNYKTTPPVLDSDGSFFLYSKLTVDKSRWQQGNVFSCSVMHEALHNHYTQKSLSLSPGKLEPKSSDKTHTPPPPPRTEVQLVESGGGLIQPGGSLRLSCAVSGFTVSKNYMSWVRQAPGKGLEWVSVVYSGGSKTYADSVKGRFTISRDNSKNTLYLQMNSLRAEDTAVYYCARAVPHSPSSFDIWGQGTMVTVSS

SEQ ID NO: 370 - protein, 586 aa, Artificial Sequence
  PR000402 Chain
EVQLVESGGGLVQPGGSLRLSCAASGFTFSSYWMSWVRQAPGKGLEWVANIKQEGSEKYYVDSVKGRFTISRDNAKNSLYLQMNSLRAEDTAVYYCARDRAVAGAFDIWGQGTMVTVSSASTKGPSVFPLAPSSKSTSGGTAALGCLVKDYFPEPVTVSWNSGALTSGVHTFPAVLQSSGLYSLSSVVTVPSSSLGTQTYICNVNHKPSNTKVDKKVEPKSCDKTHTCPPCPAPEAAGGPSVFLFPPKPKDTLMISRTPEVTCVVVDVSHEDPEVKFNWYVDGVEVHNAKTKPREEQYNSTYRVVSVLTVLHQDWLNGKEYKCKVSNKALGAPIEKTISKAKGQPREPQVYTLPPSREEMTKNQVSLTCLVKGFYPSDIAVEWESNGQPENNYKTTPPVLDSDGSFFLYSKLTVDKSRWQQGNVFSCSVMHEALHNHYTQKSLSLSPGKLGGGGSGGGGSGGGGSRTEVQLVESGGGLIQPGGSLRLSCAVSGFTVSKNYMSWVRQAPGKGLEWVSVVYSGGSKTYADSVKGRFTISRDNSKNTLYLQMNSLRAEDTAVYYCARAVPHSPSSFDIWGQGTMVTVSS

SEQ ID NO: 371 - protein, 222 aa, Artificial Sequence
  PR000403 Chain, PR000404 Chain, PR000701 Chain, PR004270 Chain, PR007164 Chain
EVQLVESGGGLVQPGGSLRLSCAASGFTFSSYWMSWVRQAPGKGLEWVANIKQEGSEKYYVDSVKGRFTISRDNAKNSLYLQMNSLRAEDTAVYYCARDRAVAGAFDIWGQGTMVTVSSASTKGPSVFPLAPSSKSTSGGTAALGCLVKDYFPEPVTVSWNSGALTSGVHTFPAVLQSSGLYSLSSVVTVPSSSLGTQTYICNVNHKPSNTKVDKKVEPKSC

SEQ ID NO: 372 - protein, 565 aa, Artificial Sequence
  PR000403 Chain
DIQMTQSPSTLSASVGDRVTVTCRASQSIYIWLAWYQQKPGKAPNLLIYKASSLETGVPSRFSGSGSGTEFTLTISSLQPDDFATYYCQQYYGSSRTFGQGTKVEIKRTVAAPSVFIFPPSDEQLKSGTASVVCLLNNFYPREAKVQWKVDNALQSGNSQESVTEQDSKDSTYSLSSTLTLSKADYEKHKVYACEVTHQGLSSPVTKSFNRGECEVQLVESGGGLIQPGGSLRLSCAVSGFTVSKNYMSWVRQAPGKGLEWVSVVYSGGSKTYADSVKGRFTISRDNSKNTLYLQMNSLRAEDTAVYYCARAVPHSPSSFDIWGQGTMVTVSSEPKSCDKTHTCPPCPAPEAAGGPSVFLFPPKPKDTLMISRTPEVTCVVVDVSHEDPEVKFNWYVDGVEVHNAKTKPREEQYNSTYRVVSVLTVLHQDWLNGKEYKCKVSNKALGAPIEKTISKAKGQPREPQVYTLPPSREEMTKNQVSLTCLVKGFYPSDIAVEWESNGQPENNYKTTPPVLDSDGSFFLYSKLTVDKSRWQQGNVFSCSVMHEALHNHYTQKSLSLSPGK

SEQ ID NO: 373 - protein, 565 aa, Artificial Sequence
  PR000404 Chain
DIQMTQSPSTLSASVGDRVTVTCRASQSIYIWLAWYQQKPGKAPNLLIYKASSLETGVPSRFSGSGSGTEFTLTISSLQPDDFATYYCQQYYGSSRTFGQGTKVEIKRTVAAPSVFIFPPSDEQLKSGTASVVCLLNNFYPREAKVQWKVDNALQSGNSQESVTEQDSKDSTYSLSSTLTLSKADYEKHKVYACEVTHQGLSSPVTKSFNRGECEVQLVESGGGLIQPGGSLRLSCAVSGFTVSKNYMSWVRQAPGKGLEWVSVVYSGGSKTYADSVKGRFTISRDNSKNTLYLQMNSLRAEDTAVYYCARAVPHSPSSFDIWGQGTMVTVSSEPKSCDKTHTCPPCPAPELLGGPSVFLFPPKPKDTLMISRTPEVTCVVVDVSHEDPEVKFNWYVDGVEVHNAKTKPREEQYNSTYRVVSVLTVLHQDWLNGKEYKCKVSNKALPAPIEKTISKAKGQPREPQVYTLPPSREEMTKNQVSLTCLVKGFYPSDIAVEWESNGQPENNYKTTPPVLDSDGSFFLYSKLTVDKSRWQQGNVFSCSVMHEALHNHYTQKSLSLSPGK

SEQ ID NO: 374 - protein, 587 aa, Artificial Sequence
  PR000539 Chain
EVQLVESGGGLVQPGGSLRLSCAASGFNIKDTYIHWVRQAPGKGLEWVARIYPTNGYTRYADSVKGRFTISADTSKNTAYLQMNSLRAEDTAVYYCSRWGGDGFYAMDYWGQGTLVTVSSASTKGPSVFPLAPSSKSTSGGTAALGCLVKDYFPEPVTVSWNSGALTSGVHTFPAVLQSSGLYSLSSVVTVPSSSLGTQTYICNVNHKPSNTKVDKKVEPKSCDKTHTCPPCPAPELLGGPSVFLFPPKPKDTLMISRTPEVTCVVVDVSHEDPEVKFNWYVDGVEVHNAKTKPREEQYNSTYRVVSVLTVLHQDWLNGKEYKCKVSNKALPAPIEKTISKAKGQPREPQVYTLPPSREEMTKNQVSLTCLVKGFYPSDIAVEWESNGQPENNYKTTPPVLDSDGSFFLYSKLTVDKSRWQQGNVFSCSVMHEALHNHYTQKSLSLSPGKLGGGGSGGGGSGGGGSRTEVQLVESGGGLIQPGGSLRLSCAVSGFTVSKNYMSWVRQAPGKGLEWVSVVYSGGSKTYADSVKGRFTISRDNSKNTLYLQMNSLRAEDTAVYYCARAVPHSPSSFDIWGQGTMVTVSS

SEQ ID NO: 375 - protein, 587 aa, Artificial Sequence
  PR000540 Chain
EVQLVESGGGLVQPGGSLRLSCAASGFNIKDTYIHWVRQAPGKGLEWVARIYPTNGYTRYADSVKGRFTISADTSKNTAYLQMNSLRAEDTAVYYCSRWGGDGFYAMDYWGQGTLVTVSSASTKGPSVFPLAPSSKSTSGGTAALGCLVKDYFPEPVTVSWNSGALTSGVHTFPAVLQSSGLYSLSSVVTVPSSSLGTQTYICNVNHKPSNTKVDKKVEPKSCDKTHTCPPCPAPELLGGPSVFLFPPKPKDTLMISRTPEVTCVVVDVSHEDPEVKFNWYVDGVEVHNAKTKPREEQYNSTYRVVSVLTVLHQDWLNGKEYKCKVSNKALPAPIEKTISKAKGQPREPQVYTLPPSREEMTKNQVSLTCLVKGFYPSDIAVEWESNGQPENNYKTTPPVLDSDGSFFLYSKLTVDKSRWQQGNVFSCSVMHEALHNHYTQKSLSLSPGKLEPKSSDKTHTPPPPPRTEVQLVESGGGLIQPGGSLRLSCAVSGFTVSKNYMSWVRQAPGKGLEWVSVVYSGGSKTYADSVKGRFTISRDNSKNTLYLQMNSLRAEDTAVYYCARAVPHSPSSFDIWGQGTMVTVSS

SEQ ID NO: 376 - protein, 711 aa, Artificial Sequence
  PR000541 Chain
EVQLVESGGGLVQPGGSLRLSCAASGFNIKDTYIHWVRQAPGKGLEWVARIYPTNGYTRYADSVKGRFTISADTSKNTAYLQMNSLRAEDTAVYYCSRWGGDGFYAMDYWGQGTLVTVSSASTKGPSVFPLAPSSKSTSGGTAALGCLVKDYFPEPVTVSWNSGALTSGVHTFPAVLQSSGLYSLSSVVTVPSSSLGTQTYICNVNHKPSNTKVDKKVEPKSCDKTHTCPPCPAPELLGGPSVFLFPPKPKDTLMISRTPEVTCVVVDVSHEDPEVKFNWYVDGVEVHNAKTKPREEQYNSTYRVVSVLTVLHQDWLNGKEYKCKVSNKALPAPIEKTISKAKGQPREPQVYTLPPSREEMTKNQVSLTCLVKGFYPSDIAVEWESNGQPENNYKTTPPVLDSDGSFFLYSKLTVDKSRWQQGNVFSCSVMHEALHNHYTQKSLSLSPGKLGGGGSGGGGSGGGGSRTEVQLVESGGGLIQPGGSLRLSCAVSGFTVSKNYMSWVRQAPGKGLEWVSVVYSGGSKTYADSVKGRFTISRDNSKNTLYLQMNSLRAEDTAVYYCARAVPHSPSSFDIWGQGTMVTVSSGGGGSEVQLVESGGGLIQPGGSLRLSCAVSGFTVSKNYMSWVRQAPGKGLEWVSVVYSGGSKTYADSVKGRFTISRDNSKNTLYLQMNSLRAEDTAVYYCARAVPHSPSSFDIWGQGTMVTVSS

SEQ ID NO: 377 - protein, 711 aa, Artificial Sequence
  PR000542 Chain
EVQLVESGGGLVQPGGSLRLSCAASGFNIKDTYIHWVRQAPGKGLEWVARIYPTNGYTRYADSVKGRFTISADTSKNTAYLQMNSLRAEDTAVYYCSRWGGDGFYAMDYWGQGTLVTVSSASTKGPSVFPLAPSSKSTSGGTAALGCLVKDYFPEPVTVSWNSGALTSGVHTFPAVLQSSGLYSLSSVVTVPSSSLGTQTYICNVNHKPSNTKVDKKVEPKSCDKTHTCPPCPAPELLGGPSVFLFPPKPKDTLMISRTPEVTCVVVDVSHEDPEVKFNWYVDGVEVHNAKTKPREEQYNSTYRVVSVLTVLHQDWLNGKEYKCKVSNKALPAPIEKTISKAKGQPREPQVYTLPPSREEMTKNQVSLTCLVKGFYPSDIAVEWESNGQPENNYKTTPPVLDSDGSFFLYSKLTVDKSRWQQGNVFSCSVMHEALHNHYTQKSLSLSPGKLEPKSSDKTHTPPPPPRTEVQLVESGGGLIQPGGSLRLSCAVSGFTVSKNYMSWVRQAPGKGLEWVSVVYSGGSKTYADSVKGRFTISRDNSKNTLYLQMNSLRAEDTAVYYCARAVPHSPSSFDIWGQGTMVTVSSGGGGSEVQLVESGGGLIQPGGSLRLSCAVSGFTVSKNYMSWVRQAPGKGLEWVSVVYSGGSKTYADSVKGRFTISRDNSKNTLYLQMNSLRAEDTAVYYCARAVPHSPSSFDIWGQGTMVTVSS

SEQ ID NO: 378 - protein, 572 aa, Artificial Sequence
  PR000653 Chain
DIQMTQSPSSLSASVGDRVTITCRASQDVNTAVAWYQQKPGKAPKLLIYSASFLYSGVPSRFSGSRSGTDFTLTISSLQPEDFATYYCQQHYTTPPTFGQGTKVEIKRTVAAPSVFIFPPSDEQLKSGTASVVCLLNNFYPREAKVQWKVDNALQSGNSQESVTEQDSKDSTYSLSSTLTLSKADYEKHKVYACEVTHQGLSSPVTKSFNRGECGGGGSGSEVQLVESGGGLIQPGGSLRLSCAVSGFTVSKNYMSWVRQAPGKGLEWVSVVYSGGSKTYADSVKGRFTISRDNSKNTLYLQMNSLRAEDTAVYYCARAVPHSPSSFDIWGQGTMVTVSSEPKSCDKTHTCPPCPAPELLGGPSVFLFPPKPKDTLMISRTPEVTCVVVDVSHEDPEVKFNWYVDGVEVHNAKTKPREEQYNSTYRVVSVLTVLHQDWLNGKEYKCKVSNKALPAPIEKTISKAKGQPREPQVYTLPPSREEMTKNQVSLTCLVKGFYPSDIAVEWESNGQPENNYKTTPPVLDSDGSFFLYSKLTVDKSRWQQGNVFSCSVMHEALHNHYTQKSLSLSPGK

SEQ ID NO: 379 - protein, 580 aa, Artificial Sequence
  PR000654 Chain
DIQMTQSPSSLSASVGDRVTITCRASQDVNTAVAWYQQKPGKAPKLLIYSASFLYSGVPSRFSGSRSGTDFTLTISSLQPEDFATYYCQQHYTTPPTFGQGTKVEIKRTVAAPSVFIFPPSDEQLKSGTASVVCLLNNFYPREAKVQWKVDNALQSGNSQESVTEQDSKDSTYSLSSTLTLSKADYEKHKVYACEVTHQGLSSPVTKSFNRGECGGGGSGGGGSGGGGSEVQLVESGGGLIQPGGSLRLSCAVSGFTVSKNYMSWVRQAPGKGLEWVSVVYSGGSKTYADSVKGRFTISRDNSKNTLYLQMNSLRAEDTAVYYCARAVPHSPSSFDIWGQGTMVTVSSEPKSCDKTHTCPPCPAPELLGGPSVFLFPPKPKDTLMISRTPEVTCVVVDVSHEDPEVKFNWYVDGVEVHNAKTKPREEQYNSTYRVVSVLTVLHQDWLNGKEYKCKVSNKALPAPIEKTISKAKGQPREPQVYTLPPSREEMTKNQVSLTCLVKGFYPSDIAVEWESNGQPENNYKTTPPVLDSDGSFFLYSKLTVDKSRWQQGNVFSCSVMHEALHNHYTQKSLSLSPGK

SEQ ID NO: 380 - protein, 580 aa, Artificial Sequence
  PR000655 Chain
DIQMTQSPSSLSASVGDRVTITCRASQDVNTAVAWYQQKPGKAPKLLIYSASFLYSGVPSRFSGSRSGTDFTLTISSLQPEDFATYYCQQHYTTPPTFGQGTKVEIKRTVAAPSVFIFPPSDEQLKSGTASVVCLLNNFYPREAKVQWKVDNALQSGNSQESVTEQDSKDSTYSLSSTLTLSKADYEKHKVYACEVTHQGLSSPVTKSFNRGECEPKSSDKTHTPPPPPEVQLVESGGGLIQPGGSLRLSCAVSGFTVSKNYMSWVRQAPGKGLEWVSVVYSGGSKTYADSVKGRFTISRDNSKNTLYLQMNSLRAEDTAVYYCARAVPHSPSSFDIWGQGTMVTVSSEPKSCDKTHTCPPCPAPELLGGPSVFLFPPKPKDTLMISRTPEVTCVVVDVSHEDPEVKFNWYVDGVEVHNAKTKPREEQYNSTYRVVSVLTVLHQDWLNGKEYKCKVSNKALPAPIEKTISKAKGQPREPQVYTLPPSREEMTKNQVSLTCLVKGFYPSDIAVEWESNGQPENNYKTTPPVLDSDGSFFLYSKLTVDKSRWQQGNVFSCSVMHEALHNHYTQKSLSLSPGK

SEQ ID NO: 381 - protein, 565 aa, Artificial Sequence
  PR000656 Chain
DIQMTQSPSSLSASVGDRVTITCRASQDVNTAVAWYQQKPGKAPKLLIYSASFLYSGVPSRFSGSRSGTDFTLTISSLQPEDFATYYCQQHYTTPPTFGQGTKVEIKRTVAAPSVFIFPPSDEQLKSGTASVVCLLNNFYPREAKVQWKVDNALQSGNSQESVTEQDSKDSTYSLSSTLTLSKADYEKHKVYACEVTHQGLSSPVTKSFNRGECEVQLVESGGGLIQPGGSLRLSCAVSGFTVSKNYMSWVRQAPGKGLEWVSVVYSGGSKTYADSVKGRFTISRDNSKNTLYLQMNSLRAEDTAVYYCARAVPHSPSSFDIWGQGTMVTVSSEPKSSDKTHTCPPCPAPELLGGPSVFLFPPKPKDTLMISRTPEVTCVVVDVSHEDPEVKFNWYVDGVEVHNAKTKPREEQYNSTYRVVSVLTVLHQDWLNGKEYKCKVSNKALPAPIEKTISKAKGQPREPQVYTLPPSREEMTKNQVSLTCLVKGFYPSDIAVEWESNGQPENNYKTTPPVLDSDGSFFLYSKLTVDKSRWQQGNVFSCSVMHEALHNHYTQKSLSLSPGK

SEQ ID NO: 382 - protein, 580 aa, Artificial Sequence
  PR000658 Chain
DIQMTQSPSSLSASVGDRVTITCRASQDVNTAVAWYQQKPGKAPKLLIYSASFLYSGVPSRFSGSRSGTDFTLTISSLQPEDFATYYCQQHYTTPPTFGQGTKVEIKRTVAAPSVFIFPPSDEQLKSGTASVVCLLNNFYPREAKVQWKVDNALQSGNSQESVTEQDSKDSTYSLSSTLTLSKADYEKHKVYACEVTHQGLSSPVTKSFNRGECGGGGSGGGGSGGGGSEVQLVESGGGLIQPGGSLRLSCAVSGFTVSKNYMSWVRQAPGKGLEWVSVVYSGGSKTYADSVKGRFTISRDNSKNTLYLQMNSLRAEDTAVYYCARAVPHSPSSFDIWGQGTMVTVSSEPKSSDKTHTCPPCPAPELLGGPSVFLFPPKPKDTLMISRTPEVTCVVVDVSHEDPEVKFNWYVDGVEVHNAKTKPREEQYNSTYRVVSVLTVLHQDWLNGKEYKCKVSNKALPAPIEKTISKAKGQPREPQVYTLPPSREEMTKNQVSLTCLVKGFYPSDIAVEWESNGQPENNYKTTPPVLDSDGSFFLYSKLTVDKSRWQQGNVFSCSVMHEALHNHYTQKSLSLSPGK

SEQ ID NO: 383 - protein, 580 aa, Artificial Sequence
  PR000659 Chain
DIQMTQSPSSLSASVGDRVTITCRASQDVNTAVAWYQQKPGKAPKLLIYSASFLYSGVPSRFSGSRSGTDFTLTISSLQPEDFATYYCQQHYTTPPTFGQGTKVEIKRTVAAPSVFIFPPSDEQLKSGTASVVCLLNNFYPREAKVQWKVDNALQSGNSQESVTEQDSKDSTYSLSSTLTLSKADYEKHKVYACEVTHQGLSSPVTKSFNRGECEPKSSDKTHTPPPPPEVQLVESGGGLIQPGGSLRLSCAVSGFTVSKNYMSWVRQAPGKGLEWVSVVYSGGSKTYADSVKGRFTISRDNSKNTLYLQMNSLRAEDTAVYYCARAVPHSPSSFDIWGQGTMVTVSSEPKSSDKTHTCPPCPAPELLGGPSVFLFPPKPKDTLMISRTPEVTCVVVDVSHEDPEVKFNWYVDGVEVHNAKTKPREEQYNSTYRVVSVLTVLHQDWLNGKEYKCKVSNKALPAPIEKTISKAKGQPREPQVYTLPPSREEMTKNQVSLTCLVKGFYPSDIAVEWESNGQPENNYKTTPPVLDSDGSFFLYSKLTVDKSRWQQGNVFSCSVMHEALHNHYTQKSLSLSPGK

SEQ ID NO: 384 - protein, 656 aa, Artificial Sequence
  PR000701 Chain
DIQMTQSPSTLSASVGDRVTVTCRASQSIYIWLAWYQQKPGKAPNLLIYKASSLETGVPSRFSGSGSGTEFTLTISSLQPDDFATYYCQQYYGSSRTFGQGTKVEIKRTVAAPSVFIFPPSDEQLKSGTASVVCLLNNFYPREAKVQWKVDNALQSGNSQESVTEQDSKDSTYSLSSTLTLSKADYEKHKVYACEVTHQGLSSPVTKSFNRGECQVQLQQWGAGLLKPSETLSLTCAVYGGSFSGYYWSWIRQPPGKGLEWIGEINHSGSTDSNPSLKGRVTFSVDTSKNQFSLKLNSVTAADTAVYYCARLTGPFDYWGQGTLVTVSSASTKGPSVFPLAPCSRSTSESTAALGCLVKDYFPEPVTVSWNSGALTSGVHTFPAVLQSSGLYSLSSVVTVPSSSLGTKTYTCNVDHKPSNTKVDKRVESKYGPPCPPCPAPEFLGGPSVFLFPPKPKDTLMISRTPEVTCVVVDVSQEDPEVQFNWYVDGVEVHNAKTKPREEQFNSTYRVVSVLTVLHQDWLNGKEYKCKVSNKGLPSSIEKTISKAKGQPREPQVYTLPPSQEEMTKNQVSLTCLVKGFYPSDIAVEWESNGQPENNYKTTPPVLDSDGSFFLYSRLTVDKSRWQEGNVFSCSVMHEALHNHYTQKSLSLSLGK

SEQ ID NO: 385 - protein, 572 aa, Artificial Sequence
  PR000706 Chain
DIQMTQSPSSLSASVGDRVTITCRASQDVNTAVAWYQQKPGKAPKLLIYSASFLYSGVPSRFSGSRSGTDFTLTISSLQPEDFATYYCQQHYTTPPTFGQGTKVEIKRTVAAPSVFIFPPSDEQLKSGTASVVCLLNNFYPREAKVQWKVDNALQSGNSQESVTEQDSKDSTYSLSSTLTLSKADYEKHKVYACEVTHQGLSSPVTKSFNRGECGGGGSGSEVQLVESGGGLIQPGGSLRLSCAVSGFTVSKNYMSWVRQAPGKGLEWVSVVYSGGSKTYADSVKGRFTISRDNSKNTLYLQMNSLRAEDTAVYYCARAVPHSPSSFDIWGQGTMVTVSSGGGGGDKTHTCPPCPAPELLGGPSVFLFPPKPKDTLMISRTPEVTCVVVDVSHEDPEVKFNWYVDGVEVHNAKTKPREEQYNSTYRVVSVLTVLHQDWLNGKEYKCKVSNKALPAPIEKTISKAKGQPREPQVYTLPPSREEMTKNQVSLTCLVKGFYPSDIAVEWESNGQPENNYKTTPPVLDSDGSFFLYSKLTVDKSRWQQGNVFSCSVMHEALHNHYTQKSLSLSPGK

SEQ ID NO: 386 - protein, 587 aa, Artificial Sequence
  PR000714 Chain
EVQLVESGGGLVQPGGSLRLSCAASGFNIKDTYIHWVRQAPGKGLEWVARIYPTNGYTRYADSVKGRFTISADTSKNTAYLQMNSLRAEDTAVYYCSRWGGDGFYAMDYWGQGTLVTVSSASTKGPSVFPLAPSSKSTSGGTAALGCLVKDYFPEPVTVSWNSGALTSGVHTFPAVLQSSGLYSLSSVVTVPSSSLGTQTYICNVNHKPSNTKVDKKVEPKSCDKTHTCPPCPAPEAAGGPSVFLFPPKPKDTLMISRTPEVTCVVVDVSHEDPEVKFNWYVDGVEVHNAKTKPREEQYNSTYRVVSVLTVLHQDWLNGKEYKCKVSNKALGAPIEKTISKAKGQPREPQVYTLPPSREEMTKNQVSLTCLVKGFYPSDIAVEWESNGQPENNYKTTPPVLDSDGSFFLYSKLTVDKSRWQQGNVFSCSVMHEALHNHYTQKSLSLSPGKLGGGGSGGGGSGGGGSRTEVQLVESGGGLIQPGGSLRLSCAVSGFTVSKNYMSWVRQAPGKGLEWVSVVYSGGSKTYADSVKGRFTISRDNSKNTLYLQMNSLRAEDTAVYYCARAVPHSPSSFDIWGQGTMVTVSS

SEQ ID NO: 387 - protein, 587 aa, Artificial Sequence
  PR000715 Chain
EVQLVESGGGLVQPGGSLRLSCAASGFNIKDTYIHWVRQAPGKGLEWVARIYPTNGYTRYADSVKGRFTISADTSKNTAYLQMNSLRAEDTAVYYCSRWGGDGFYAMDYWGQGTLVTVSSASTKGPSVFPLAPSSKSTSGGTAALGCLVKDYFPEPVTVSWNSGALTSGVHTFPAVLQSSGLYSLSSVVTVPSSSLGTQTYICNVNHKPSNTKVDKKVEPKSCDKTHTCPPCPAPELLGGPDVFLFPPKPKDTLMISRTPEVTCVVVDVSHEDPEVKFNWYVDGVEVHNAKTKPREEQYNSTYRVVSVLTVLHQDWLNGKEYKCKVSNKALPAPEEKTISKAKGQPREPQVYTLPPSREEMTKNQVSLTCLVKGFYPSDIAVEWESNGQPENNYKTTPPVLDSDGSFFLYSKLTVDKSRWQQGNVFSCSVMHEALHNHYTQKSLSLSPGKLGGGGSGGGGSGGGGSRTEVQLVESGGGLIQPGGSLRLSCAVSGFTVSKNYMSWVRQAPGKGLEWVSVVYSGGSKTYADSVKGRFTISRDNSKNTLYLQMNSLRAEDTAVYYCARAVPHSPSSFDIWGQGTMVTVSS

SEQ ID NO: 388 - protein, 580 aa, Artificial Sequence
  PR000716 Chain
DIQMTQSPSSLSASVGDRVTITCRASQDVNTAVAWYQQKPGKAPKLLIYSASFLYSGVPSRFSGSRSGTDFTLTISSLQPEDFATYYCQQHYTTPPTFGQGTKVEIKRTVAAPSVFIFPPSDEQLKSGTASVVCLLNNFYPREAKVQWKVDNALQSGNSQESVTEQDSKDSTYSLSSTLTLSKADYEKHKVYACEVTHQGLSSPVTKSFNRGECGGGGSGGGGSGGGGSEVQLVESGGGLIQPGGSLRLSCAVSGFTVSKNYMSWVRQAPGKGLEWVSVVYSGGSKTYADSVKGRFTISRDNSKNTLYLQMNSLRAEDTAVYYCARAVPHSPSSFDIWGQGTMVTVSSEPKSSDKTHTCPPCPAPEAAGGPSVFLFPPKPKDTLMISRTPEVTCVVVDVSHEDPEVKFNWYVDGVEVHNAKTKPREEQYNSTYRVVSVLTVLHQDWLNGKEYKCKVSNKALGAPIEKTISKAKGQPREPQVYTLPPSREEMTKNQVSLTCLVKGFYPSDIAVEWESNGQPENNYKTTPPVLDSDGSFFLYSKLTVDKSRWQQGNVFSCSVMHEALHNHYTQKSLSLSPGK

SEQ ID NO: 389 - protein, 580 aa, Artificial Sequence
  PR000717 Chain
DIQMTQSPSSLSASVGDRVTITCRASQDVNTAVAWYQQKPGKAPKLLIYSASFLYSGVPSRFSGSRSGTDFTLTISSLQPEDFATYYCQQHYTTPPTFGQGTKVEIKRTVAAPSVFIFPPSDEQLKSGTASVVCLLNNFYPREAKVQWKVDNALQSGNSQESVTEQDSKDSTYSLSSTLTLSKADYEKHKVYACEVTHQGLSSPVTKSFNRGECGGGGSGGGGSGGGGSEVQLVESGGGLIQPGGSLRLSCAVSGFTVSKNYMSWVRQAPGKGLEWVSVVYSGGSKTYADSVKGRFTISRDNSKNTLYLQMNSLRAEDTAVYYCARAVPHSPSSFDIWGQGTMVTVSSEPKSSDKTHTCPPCPAPELLGGPDVFLFPPKPKDTLMISRTPEVTCVVVDVSHEDPEVKFNWYVDGVEVHNAKTKPREEQYNSTYRVVSVLTVLHQDWLNGKEYKCKVSNKALPAPEEKTISKAKGQPREPQVYTLPPSREEMTKNQVSLTCLVKGFYPSDIAVEWESNGQPENNYKTTPPVLDSDGSFFLYSKLTVDKSRWQQGNVFSCSVMHEALHNHYTQKSLSLSPGK

SEQ ID NO: 390 - protein, 351 aa, Artificial Sequence
  PR000916 Chain, PR001609 Chain
EVQLVESGGGLIQPGGSLRLSCAVSGFTVSKNYMSWVRQAPGKGLEWVSVVYSGGSKTYADSVKGRFTISRDNSKNTLYLQMNSLRAEDTAVYYCARAVPHSPSSFDIWGQGTMVTVSSEPKSSDKTHTCPPCPAPELLGGPSVFLFPPKPKDTLMISRTPEVTCVVVDVSHEDPEVKFNWYVDGVEVHNAKTKPREEQYNSTYRVVSVLTVLHQDWLNGKEYKCKVSNKALPAPIEKTISKAKGQPREPQVCTLPPSREEMTKNQVSLSCAVKGFYPSDIAVEWESNGQPENNYKTTPPVLDSDGSFFLVSKLTVDKSRWQQGNVFSCSVMHEALHNHYTQKSLSLSPGK

SEQ ID NO: 391 - protein, 450 aa, Artificial Sequence
  PR000916 Chain, PR002666 Chain, PR002667 Chain
EVQLVESGGGLVQPGGSLRLSCAASGFNIKDTYIHWVRQAPGKGLEWVARIYPTNGYTRYADSVKGRFTISADTSKNTAYLQMNSLRAEDTAVYYCSRWGGDGFYAMDYWGQGTLVTVSSASTKGPSVFPLAPSSKSTSGGTAALGCLVKDYFPEPVTVSWNSGALTSGVHTFPAVLQSSGLYSLSSVVTVPSSSLGTQTYICNVNHKPSNTKVDKKVEPKSCDKTHTCPPCPAPELLGGPSVFLFPPKPKDTLMISRTPEVTCVVVDVSHEDPEVKFNWYVDGVEVHNAKTKPREEQYNSTYRVVSVLTVLHQDWLNGKEYKCKVSNKALPAPIEKTISKAKGQPREPQVYTLPPCREEMTKNQVSLWCLVKGFYPSDIAVEWESNGQPENNYKTTPPVLDSDGSFFLYSKLTVDKSRWQQGNVFSCSVMHEALHNHYTQKSLSLSPGK

SEQ ID NO: 392 - protein, 351 aa, Artificial Sequence
  PR000917 Chain, PR001610 Chain
EVQLVESGGGLIQPGGSLRLSCAVSGFTVSKNYMSWVRQAPGKGLEWVSVVYSGGSKTYADSVKGRFTISRDNSKNTLYLQMNSLRAEDTAVYYCARAVPHSPSSFDIWGQGTMVTVSSEPKSSDKTHTCPPCPAPELLGGPDVFLFPPKPKDTLMISRTPEVTCVVVDVSHEDPEVKFNWYVDGVEVHNAKTKPREEQYNSTYRVVSVLTVLHQDWLNGKEYKCKVSNKALPAPEEKTISKAKGQPREPQVCTLPPSREEMTKNQVSLSCAVKGFYPSDIAVEWESNGQPENNYKTTPPVLDSDGSFFLVSKLTVDKSRWQQGNVFSCSVMHEALHNHYTQKSLSLSPGK

SEQ ID NO: 393 - protein, 450 aa, Artificial Sequence
  PR000917 Chain, PR002668 Chain, PR002669 Chain
EVQLVESGGGLVQPGGSLRLSCAASGFNIKDTYIHWVRQAPGKGLEWVARIYPTNGYTRYADSVKGRFTISADTSKNTAYLQMNSLRAEDTAVYYCSRWGGDGFYAMDYWGQGTLVTVSSASTKGPSVFPLAPSSKSTSGGTAALGCLVKDYFPEPVTVSWNSGALTSGVHTFPAVLQSSGLYSLSSVVTVPSSSLGTQTYICNVNHKPSNTKVDKKVEPKSCDKTHTCPPCPAPELLGGPDVFLFPPKPKDTLMISRTPEVTCVVVDVSHEDPEVKFNWYVDGVEVHNAKTKPREEQYNSTYRVVSVLTVLHQDWLNGKEYKCKVSNKALPAPEEKTISKAKGQPREPQVYTLPPCREEMTKNQVSLWCLVKGFYPSDIAVEWESNGQPENNYKTTPPVLDSDGSFFLYSKLTVDKSRWQQGNVFSCSVMHEALHNHYTQKSLSLSPGK

SEQ ID NO: 394 - protein, 587 aa, Artificial Sequence
  PR001573 Chain, PR001575 Chain
EVQLVESGGGLIQPGGSLRLSCAVSGFTVSKNYMSWVRQAPGKGLEWVSVVYSGGSKTYADSVKGRFTISRDNSKNTLYLQMNSLRAEDTAVYYCARAVPHSPSSFDIWGQGTMVTVSSKLEPKSSDKTHTPPPPPRTEVQLVESGGGLVQPGGSLRLSCAASGFTFSSYWMSWVRQAPGKGLEWVANIKQEGSEKYYVDSVKGRFTISRDNAKNSLYLQMNSLRAEDTAVYYCARDRAVAGAFDIWGQGTMVTVSSASTKGPSVFPLAPSSKSTSGGTAALGCLVKDYFPEPVTVSWNSGALTSGVHTFPAVLQSSGLYSLSSVVTVPSSSLGTQTYICNVNHKPSNTKVDKKVEPKSCDKTHTCPPCPAPELLGGPSVFLFPPKPKDTLMISRTPEVTCVVVDVSHEDPEVKFNWYVDGVEVHNAKTKPREEQYNSTYRVVSVLTVLHQDWLNGKEYKCKVSNKALPAPIEKTISKAKGQPREPQVYTLPPSREEMTKNQVSLTCLVKGFYPSDIAVEWESNGQPENNYKTTPPVLDSDGSFFLYSKLTVDKSRWQQGNVFSCSVMHEALHNHYTQKSLSLSPGK

SEQ ID NO: 395 - protein, 587 aa, Artificial Sequence
  PR001576 Chain, PR001578 Chain
EVQLVESGGGLIQPGGSLRLSCAVSGFTVSKNYMSWVRQAPGKGLEWVSVVYSGGSKTYADSVKGRFTISRDNSKNTLYLQMNSLRAEDTAVYYCARAVPHSPSSFDIWGQGTMVTVSSKLEPKSSDKTHTPPPPPRTEVQLVESGGGLVQPGGSLRLSCAASGFTFSSYWMSWVRQAPGKGLEWVANIKQEGSEKYYVDSVKGRFTISRDNAKNSLYLQMNSLRAEDTAVYYCARDRAVAGAFDIWGQGTMVTVSSASTKGPSVFPLAPSSKSTSGGTAALGCLVKDYFPEPVTVSWNSGALTSGVHTFPAVLQSSGLYSLSSVVTVPSSSLGTQTYICNVNHKPSNTKVDKKVEPKSCDKTHTCPPCPAPELLGGPDVFLFPPKPKDTLMISRTPEVTCVVVDVSHEDPEVKFNWYVDGVEVHNAKTKPREEQYNSTYRVVSVLTVLHQDWLNGKEYKCKVSNKALPAPEEKTISKAKGQPREPQVYTLPPSREEMTKNQVSLTCLVKGFYPSDIAVEWESNGQPENNYKTTPPVLDSDGSFFLYSKLTVDKSRWQQGNVFSCSVMHEALHNHYTQKSLSLSPGK

SEQ ID NO: 396 - protein, 449 aa, Artificial Sequence
  PR001577 Chain
EVQLVESGGGLVQPGGSLRLSCAASGFTFSSYWMSWVRQAPGKGLEWVANIKQEGSEKYYVDSVKGRFTISRDNAKNSLYLQMNSLRAEDTAVYYCARDRAVAGAFDIWGQGTMVTVSSASTKGPSVFPLAPSSKSTSGGTAALGCLVKDYFPEPVTVSWNSGALTSGVHTFPAVLQSSGLYSLSSVVTVPSSSLGTQTYICNVNHKPSNTKVDKKVEPKSCDKTHTCPPCPAPELLGGPDVFLFPPKPKDTLMISRTPEVTCVVVDVSHEDPEVKFNWYVDGVEVHNAKTKPREEQYNSTYRVVSVLTVLHQDWLNGKEYKCKVSNKALPAPEEKTISKAKGQPREPQVYTLPPSREEMTKNQVSLTCLVKGFYPSDIAVEWESNGQPENNYKTTPPVLDSDGSFFLYSKLTVDKSRWQQGNVFSCSVMHEALHNHYTQKSLSLSPGK

SEQ ID NO: 397 - protein, 721 aa, Artificial Sequence
  PR001579 Chain
EVQLVESGGGLVQPGGSLRLSCAASGFNIKDTYIHWVRQAPGKGLEWVARIYPTNGYTRYADSVKGRFTISADTSKNTAYLQMNSLRAEDTAVYYCSRWGGDGFYAMDYWGQGTLVTVSSASTKGPSVFPLAPSSKSTSGGTAALGCLVKDYFPEPVTVSWNSGALTSGVHTFPAVLQSSGLYSLSSVVTVPSSSLGTQTYICNVNHKPSNTKVDKKVEPKSCDKTHTCPPCPAPELLGGPSVFLFPPKPKDTLMISRTPEVTCVVVDVSHEDPEVKFNWYVDGVEVHNAKTKPREEQYNSTYRVVSVLTVLHQDWLNGKEYKCKVSNKALPAPIEKTISKAKGQPREPQVYTLPPSREEMTKNQVSLTCLVKGFYPSDIAVEWESNGQPENNYKTTPPVLDSDGSFFLYSKLTVDKSRWQQGNVFSCSVMHEALHNHYTQKSLSLSPGKLEPKSSDKTHTPPPPPRTEVQLVESGGGLIQPGGSLRLSCAVSGFTVSKNYMSWVRQAPGKGLEWVSVVYSGGSKTYADSVKGRFTISRDNSKNTLYLQMNSLRAEDTAVYYCARAVPHSPSSFDIWGQGTMVTVSSGGGGSGGGGSGGGGSEVQLVESGGGLIQPGGSLRLSCAVSGFTVSKNYMSWVRQAPGKGLEWVSVVYSGGSKTYADSVKGRFTISRDNSKNTLYLQMNSLRAEDTAVYYCARAVPHSPSSFDIWGQGTMVTVSS

SEQ ID NO: 398 - protein, 726 aa, Artificial Sequence
  PR001580 Chain
EVQLVESGGGLVQPGGSLRLSCAASGFNIKDTYIHWVRQAPGKGLEWVARIYPTNGYTRYADSVKGRFTISADTSKNTAYLQMNSLRAEDTAVYYCSRWGGDGFYAMDYWGQGTLVTVSSASTKGPSVFPLAPSSKSTSGGTAALGCLVKDYFPEPVTVSWNSGALTSGVHTFPAVLQSSGLYSLSSVVTVPSSSLGTQTYICNVNHKPSNTKVDKKVEPKSCDKTHTCPPCPAPELLGGPSVFLFPPKPKDTLMISRTPEVTCVVVDVSHEDPEVKFNWYVDGVEVHNAKTKPREEQYNSTYRVVSVLTVLHQDWLNGKEYKCKVSNKALPAPIEKTISKAKGQPREPQVYTLPPSREEMTKNQVSLTCLVKGFYPSDIAVEWESNGQPENNYKTTPPVLDSDGSFFLYSKLTVDKSRWQQGNVFSCSVMHEALHNHYTQKSLSLSPGKLEPKSSDKTHTPPPPPRTEVQLVESGGGLIQPGGSLRLSCAVSGFTVSKNYMSWVRQAPGKGLEWVSVVYSGGSKTYADSVKGRFTISRDNSKNTLYLQMNSLRAEDTAVYYCARAVPHSPSSFDIWGQGTMVTVSSGGGGSGGGGSGGGGSGGGGSEVQLVESGGGLIQPGGSLRLSCAVSGFTVSKNYMSWVRQAPGKGLEWVSVVYSGGSKTYADSVKGRFTISRDNSKNTLYLQMNSLRAEDTAVYYCARAVPHSPSSFDIWGQGTMVTVSS

SEQ ID NO: 399 - protein, 721 aa, Artificial Sequence
  PR001581 Chain
EVQLVESGGGLVQPGGSLRLSCAASGFNIKDTYIHWVRQAPGKGLEWVARIYPTNGYTRYADSVKGRFTISADTSKNTAYLQMNSLRAEDTAVYYCSRWGGDGFYAMDYWGQGTLVTVSSASTKGPSVFPLAPSSKSTSGGTAALGCLVKDYFPEPVTVSWNSGALTSGVHTFPAVLQSSGLYSLSSVVTVPSSSLGTQTYICNVNHKPSNTKVDKKVEPKSCDKTHTCPPCPAPELLGGPSVFLFPPKPKDTLMISRTPEVTCVVVDVSHEDPEVKFNWYVDGVEVHNAKTKPREEQYNSTYRVVSVLTVLHQDWLNGKEYKCKVSNKALPAPIEKTISKAKGQPREPQVYTLPPSREEMTKNQVSLTCLVKGFYPSDIAVEWESNGQPENNYKTTPPVLDSDGSFFLYSKLTVDKSRWQQGNVFSCSVMHEALHNHYTQKSLSLSPGKLEPKSSDKTHTPPPPPRTEVQLVESGGGLIQPGGSLRLSCAVSGFTVSKNYMSWVRQAPGKGLEWVSVVYSGGSKTYADSVKGRFTISRDNSKNTLYLQMNSLRAEDTAVYYCARAVPHSPSSFDIWGQGTMVTVSSEPKSSDKTHTPPPPPEVQLVESGGGLIQPGGSLRLSCAVSGFTVSKNYMSWVRQAPGKGLEWVSVVYSGGSKTYADSVKGRFTISRDNSKNTLYLQMNSLRAEDTAVYYCARAVPHSPSSFDIWGQGTMVTVSS

SEQ ID NO: 400 - protein, 707 aa, Artificial Sequence
  PR001582 Chain
EVQLVESGGGLVQPGGSLRLSCAASGFNIKDTYIHWVRQAPGKGLEWVARIYPTNGYTRYADSVKGRFTISADTSKNTAYLQMNSLRAEDTAVYYCSRWGGDGFYAMDYWGQGTLVTVSSASTKGPSVFPLAPSSKSTSGGTAALGCLVKDYFPEPVTVSWNSGALTSGVHTFPAVLQSSGLYSLSSVVTVPSSSLGTQTYICNVNHKPSNTKVDKKVEPKSCDKTHTCPPCPAPELLGGPDVFLFPPKPKDTLMISRTPEVTCVVVDVSHEDPEVKFNWYVDGVEVHNAKTKPREEQYNSTYRVVSVLTVLHQDWLNGKEYKCKVSNKALPAPEEKTISKAKGQPREPQVYTLPPSREEMTKNQVSLTCLVKGFYPSDIAVEWESNGQPENNYKTTPPVLDSDGSFFLYSKLTVDKSRWQQGNVFSCSVMHEALHNHYTQKSLSLSPGGGGGSGGGGSGGGGSEVQLVESGGGLIQPGGSLRLSCAVSGFTVSKNYMSWVRQAPGKGLEWVSVVYSGGSKTYADSVKGRFTISRDNSKNTLYLQMNSLRAEDTAVYYCARAVPHSPSSFDIWGQGTMVTVSSGGGGSEVQLVESGGGLIQPGGSLRLSCAVSGFTVSKNYMSWVRQAPGKGLEWVSVVYSGGSKTYADSVKGRFTISRDNSKNTLYLQMNSLRAEDTAVYYCARAVPHSPSSFDIWGQGTMVTVSS

SEQ ID NO: 401 - protein, 588 aa, Artificial Sequence
  PR001583 Chain, PR001585 Chain
EVQLVESGGGLIQPGGSLRLSCAVSGFTVSKNYMSWVRQAPGKGLEWVSVVYSGGSKTYADSVKGRFTISRDNSKNTLYLQMNSLRAEDTAVYYCARAVPHSPSSFDIWGQGTMVTVSSKLEPKSSDKTHTPPPPPRTEVQLVESGGGLVQPGGSLRLSCAASGFNIKDTYIHWVRQAPGKGLEWVARIYPTNGYTRYADSVKGRFTISADTSKNTAYLQMNSLRAEDTAVYYCSRWGGDGFYAMDYWGQGTLVTVSSASTKGPSVFPLAPSSKSTSGGTAALGCLVKDYFPEPVTVSWNSGALTSGVHTFPAVLQSSGLYSLSSVVTVPSSSLGTQTYICNVNHKPSNTKVDKKVEPKSCDKTHTCPPCPAPELLGGPSVFLFPPKPKDTLMISRTPEVTCVVVDVSHEDPEVKFNWYVDGVEVHNAKTKPREEQYNSTYRVVSVLTVLHQDWLNGKEYKCKVSNKALPAPIEKTISKAKGQPREPQVYTLPPSREEMTKNQVSLTCLVKGFYPSDIAVEWESNGQPENNYKTTPPVLDSDGSFFLYSKLTVDKSRWQQGNVFSCSVMHEALHNHYTQKSLSLSPGK

SEQ ID NO: 402 - protein, 352 aa, Artificial Sequence
  PR001584 Chain, PR001585 Chain, PR001587 Chain, PR001974 Chain
EVQLVESGGGLIQPGGSLRLSCAVSGFTVSKNYMSWVRQAPGKGLEWVSVVYSGGSKTYADSVKGRFTISRDNSKNTLYLQMNSLRAEDTAVYYCARAVPHSPSSFDIWGQGTMVTVSSKLEPKSSDKTHTPPPPPASDIQMTQSPSSLSASVGDRVTITCRASQDVNTAVAWYQQKPGKAPKLLIYSASFLYSGVPSRFSGSRSGTDFTLTISSLQPEDFATYYCQQHYTTPPTFGQGTKVEIKRTVAAPSVFIFPPSDEQLKSGTASVVCLLNNFYPREAKVQWKVDNALQSGNSQESVTEQDSKDSTYSLSSTLTLSKADYEKHKVYACEVTHQGLSSPVTKSFNRGEC

SEQ ID NO: 403 - protein, 588 aa, Artificial Sequence
  PR001586 Chain, PR001587 Chain
EVQLVESGGGLIQPGGSLRLSCAVSGFTVSKNYMSWVRQAPGKGLEWVSVVYSGGSKTYADSVKGRFTISRDNSKNTLYLQMNSLRAEDTAVYYCARAVPHSPSSFDIWGQGTMVTVSSKLEPKSSDKTHTPPPPPRTEVQLVESGGGLVQPGGSLRLSCAASGFNIKDTYIHWVRQAPGKGLEWVARIYPTNGYTRYADSVKGRFTISADTSKNTAYLQMNSLRAEDTAVYYCSRWGGDGFYAMDYWGQGTLVTVSSASTKGPSVFPLAPSSKSTSGGTAALGCLVKDYFPEPVTVSWNSGALTSGVHTFPAVLQSSGLYSLSSVVTVPSSSLGTQTYICNVNHKPSNTKVDKKVEPKSCDKTHTCPPCPAPELLGGPDVFLFPPKPKDTLMISRTPEVTCVVVDVSHEDPEVKFNWYVDGVEVHNAKTKPREEQYNSTYRVVSVLTVLHQDWLNGKEYKCKVSNKALPAPEEKTISKAKGQPREPQVYTLPPSREEMTKNQVSLTCLVKGFYPSDIAVEWESNGQPENNYKTTPPVLDSDGSFFLYSKLTVDKSRWQQGNVFSCSVMHEALHNHYTQKSLSLSPGK

SEQ ID NO: 404 - protein, 587 aa, Artificial Sequence
  PR001588 Chain, PR001590 Chain
EVQLVESGGGLIQPGGSLRLSCAVSGFTVSKNYMSWVRQAPGKGLEWVSVVYSGGSKTYADSVKGRFTISRDNSKNTLYLQMNSLRAEDTAVYYCARAVPHSPSSFDIWGQGTMVTVSSKLEPKSSDKTHTPPPPPRTEVQLVESGGGLVQPGGSLRLSCAASGFTFTDYTMDWVRQAPGKGLEWVADVNPNSGGSIYNQRFKGRFTLSVDRSKNTLYLQMNSLRAEDTAVYYCARNLGPSFYFDYWGQGTLVTVSSASTKGPSVFPLAPSSKSTSGGTAALGCLVKDYFPEPVTVSWNSGALTSGVHTFPAVLQSSGLYSLSSVVTVPSSSLGTQTYICNVNHKPSNTKVDKKVEPKSCDKTHTCPPCPAPELLGGPSVFLFPPKPKDTLMISRTPEVTCVVVDVSHEDPEVKFNWYVDGVEVHNAKTKPREEQYNSTYRVVSVLTVLHQDWLNGKEYKCKVSNKALPAPIEKTISKAKGQPREPQVYTLPPSREEMTKNQVSLTCLVKGFYPSDIAVEWESNGQPENNYKTTPPVLDSDGSFFLYSKLTVDKSRWQQGNVFSCSVMHEALHNHYTQKSLSLSPGK

SEQ ID NO: 405 - protein, 352 aa, Artificial Sequence
  PR001589 Chain, PR001590 Chain, PR001592 Chain
EVQLVESGGGLIQPGGSLRLSCAVSGFTVSKNYMSWVRQAPGKGLEWVSVVYSGGSKTYADSVKGRFTISRDNSKNTLYLQMNSLRAEDTAVYYCARAVPHSPSSFDIWGQGTMVTVSSKLEPKSSDKTHTPPPPPASDIQMTQSPSSLSASVGDRVTITCKASQDVSIGVAWYQQKPGKAPKLLIYSASYRYTGVPSRFSGSGSGTDFTLTISSLQPEDFATYYCQQYYIYPYTFGQGTKVEIKRTVAAPSVFIFPPSDEQLKSGTASVVCLLNNFYPREAKVQWKVDNALQSGNSQESVTEQDSKDSTYSLSSTLTLSKADYEKHKVYACEVTHQGLSSPVTKSFNRGEC

SEQ ID NO: 406 - protein, 587 aa, Artificial Sequence
  PR001591 Chain, PR001592 Chain
EVQLVESGGGLIQPGGSLRLSCAVSGFTVSKNYMSWVRQAPGKGLEWVSVVYSGGSKTYADSVKGRFTISRDNSKNTLYLQMNSLRAEDTAVYYCARAVPHSPSSFDIWGQGTMVTVSSKLEPKSSDKTHTPPPPPRTEVQLVESGGGLVQPGGSLRLSCAASGFTFTDYTMDWVRQAPGKGLEWVADVNPNSGGSIYNQRFKGRFTLSVDRSKNTLYLQMNSLRAEDTAVYYCARNLGPSFYFDYWGQGTLVTVSSASTKGPSVFPLAPSSKSTSGGTAALGCLVKDYFPEPVTVSWNSGALTSGVHTFPAVLQSSGLYSLSSVVTVPSSSLGTQTYICNVNHKPSNTKVDKKVEPKSCDKTHTCPPCPAPELLGGPDVFLFPPKPKDTLMISRTPEVTCVVVDVSHEDPEVKFNWYVDGVEVHNAKTKPREEQYNSTYRVVSVLTVLHQDWLNGKEYKCKVSNKALPAPEEKTISKAKGQPREPQVYTLPPSREEMTKNQVSLTCLVKGFYPSDIAVEWESNGQPENNYKTTPPVLDSDGSFFLYSKLTVDKSRWQQGNVFSCSVMHEALHNHYTQKSLSLSPGK

SEQ ID NO: 407 - protein, 449 aa, Artificial Sequence
  PR001609 Chain
EVQLVESGGGLVQPGGSLRLSCAASGFTFSSYWMSWVRQAPGKGLEWVANIKQEGSEKYYVDSVKGRFTISRDNAKNSLYLQMNSLRAEDTAVYYCARDRAVAGAFDIWGQGTMVTVSSASTKGPSVFPLAPSSKSTSGGTAALGCLVKDYFPEPVTVSWNSGALTSGVHTFPAVLQSSGLYSLSSVVTVPSSSLGTQTYICNVNHKPSNTKVDKKVEPKSCDKTHTCPPCPAPELLGGPSVFLFPPKPKDTLMISRTPEVTCVVVDVSHEDPEVKFNWYVDGVEVHNAKTKPREEQYNSTYRVVSVLTVLHQDWLNGKEYKCKVSNKALPAPIEKTISKAKGQPREPQVYTLPPCREEMTKNQVSLWCLVKGFYPSDIAVEWESNGQPENNYKTTPPVLDSDGSFFLYSKLTVDKSRWQQGNVFSCSVMHEALHNHYTQKSLSLSPGK

SEQ ID NO: 408 - protein, 449 aa, Artificial Sequence
  PR001610 Chain
EVQLVESGGGLVQPGGSLRLSCAASGFTFSSYWMSWVRQAPGKGLEWVANIKQEGSEKYYVDSVKGRFTISRDNAKNSLYLQMNSLRAEDTAVYYCARDRAVAGAFDIWGQGTMVTVSSASTKGPSVFPLAPSSKSTSGGTAALGCLVKDYFPEPVTVSWNSGALTSGVHTFPAVLQSSGLYSLSSVVTVPSSSLGTQTYICNVNHKPSNTKVDKKVEPKSCDKTHTCPPCPAPELLGGPDVFLFPPKPKDTLMISRTPEVTCVVVDVSHEDPEVKFNWYVDGVEVHNAKTKPREEQYNSTYRVVSVLTVLHQDWLNGKEYKCKVSNKALPAPEEKTISKAKGQPREPQVYTLPPCREEMTKNQVSLWCLVKGFYPSDIAVEWESNGQPENNYKTTPPVLDSDGSFFLYSKLTVDKSRWQQGNVFSCSVMHEALHNHYTQKSLSLSPGK

SEQ ID NO: 409 - protein, 450 aa, Artificial Sequence
  PR001974 Chain
EVQLVESGGGLVQPGGSLRLSCAASGFNIKDTYIHWVRQAPGKGLEWVARIYPTNGYTRYADSVKGRFTISADTSKNTAYLQMNSLRAEDTAVYYCSRWGGDGFYAMDYWGQGTLVTVSSASTKGPSVFPLAPSSKSTSGGTAALGCLVKDYFPEPVTVSWNSGALTSGVHTFPAVLQSSGLYSLSSVVTVPSSSLGTQTYICNVNHKPSNTKVDKKVEPKSCDKTHTCPPCPAPELLGGPDVFLFPPKPKDTLMISRTPEVTCVVVDVSHEDPEVKFNWYVDGVEVHNAKTKPREEQYNSTYRVVSVLTVLHQDWLNGKEYKCKVSNKALPAPEEKTISKAKGQPREPQVYTLPPSREEMTKNQVSLTCLVKGFYPSDIAVEWESNGQPENNYKTTPPVLDSDGSFFLYSKLTVDKSRWQQGNVFSCSVMHEALHNHYTQKSLSLSPGK

SEQ ID NO: 410 - protein, 356 aa, Artificial Sequence
  PR001987 Chain, PR001991 Chain, PR001995 Chain, PR001999 Chain
EVQLLESGGGLVQPGGSLRLSCAASGFTFSSYAMIWVRQAPGKGLEWVSGISESGGSTYYADSVKGRFTISRDNSKNTLYLQMNSLRAEDTAVYFCVKDLDDILTGYYKDYWGQGTLVTVSSASEPKSSDKTHTCPPCPAPEAAGGPSVFLFPPKPKDTLMISRTPEVTCVVVDVSHEDPEVKFNWYVDGVEVHNAKTKPREEQYNSTYRVVSVLTVLHQDWLNGKEYKCKVSNKALGAPIEKTISKAKGQPREPQVCTLPPSREEMTKNQVSLSCAVKGFYPSDIAVEWESNGQPENNYKTTPPVLDSDGSFFLVSKLTVDKSRWQQGNVFSCSVMHEALHNHYTQKSLSLSPGK

SEQ ID NO: 411 - protein, 455 aa, Artificial Sequence
  PR001987 Chain, PR001988 Chain, PR001989 Chain, PR001990 Chain
EVQLLESGGGLVQPGGSLRLSCAASGFTFNTYAMNWVRQAPGKGLEWVSRIRSKYNNYATYYADSVKDRFTISRDDSKSTLYLQMNSLRAEDTAVYYCVRHGNFGNSYVSWFAYWGQGTLVTVSSASTKGPSVFPLAPSSKSTSGGTAALGCLVKDYFPEPVTVSWNSGALTSGVHTFPAVLQSSGLYSLSSVVTVPSSSLGTQTYICNVNHKPSNTKVDKKVEPKSCDKTHTCPPCPAPEAAGGPSVFLFPPKPKDTLMISRTPEVTCVVVDVSHEDPEVKFNWYVDGVEVHNAKTKPREEQYNSTYRVVSVLTVLHQDWLNGKEYKCKVSNKALGAPIEKTISKAKGQPREPQVYTLPPCREEMTKNQVSLWCLVKGFYPSDIAVEWESNGQPENNYKTTPPVLDSDGSFFLYSKLTVDKSRWQQGNVFSCSVMHEALHNHYTQKSLSLSPGK

SEQ ID NO: 412 - protein, 354 aa, Artificial Sequence
  PR001988 Chain, PR001992 Chain, PR001996 Chain, PR002000 Chain
EVQLVETGGGLIQPGGSLRLSCAASGFPVSSNYMSWVRQAPGKGLEWVSVIFSGGRTYYADSVKGRFTISRDNSKNTLYLQMNSLRAEDTAVYYCARRNWIDGRDAFDIWGQGTMVTVSSASEPKSSDKTHTCPPCPAPEAAGGPSVFLFPPKPKDTLMISRTPEVTCVVVDVSHEDPEVKFNWYVDGVEVHNAKTKPREEQYNSTYRVVSVLTVLHQDWLNGKEYKCKVSNKALGAPIEKTISKAKGQPREPQVCTLPPSREEMTKNQVSLSCAVKGFYPSDIAVEWESNGQPENNYKTTPPVLDSDGSFFLVSKLTVDKSRWQQGNVFSCSVMHEALHNHYTQKSLSLSPGK

SEQ ID NO: 413 - protein, 354 aa, Artificial Sequence
  PR001989 Chain, PR001993 Chain, PR001997 Chain, PR002001 Chain
EVQLVETGGGLIQPGGSLRLSCAASGFTVSSNYMTWVRQAPGKGLEWVSVIFSGGSTYYADSVKGRFTISRDNSKNTLYLQMNSLRAEDTAVYYCARRIAVAGHDVFDIWGQGTMVTVSSASEPKSSDKTHTCPPCPAPEAAGGPSVFLFPPKPKDTLMISRTPEVTCVVVDVSHEDPEVKFNWYVDGVEVHNAKTKPREEQYNSTYRVVSVLTVLHQDWLNGKEYKCKVSNKALGAPIEKTISKAKGQPREPQVCTLPPSREEMTKNQVSLSCAVKGFYPSDIAVEWESNGQPENNYKTTPPVLDSDGSFFLVSKLTVDKSRWQQGNVFSCSVMHEALHNHYTQKSLSLSPGK

SEQ ID NO: 414 - protein, 356 aa, Artificial Sequence
  PR001990 Chain, PR001994 Chain, PR001998 Chain, PR002002 Chain
EVQLVETGGGLIQPGGSLRLSCAASGFTVSDNYMTWVRQAPGKGLEWVSVIFSGGNTYYADSVKGRFTISRDNAKNTLYLQMNSLRAEDTALYYCARRNYDDTRGTDVFDIWGQGTMVTVSSASEPKSSDKTHTCPPCPAPEAAGGPSVFLFPPKPKDTLMISRTPEVTCVVVDVSHEDPEVKFNWYVDGVEVHNAKTKPREEQYNSTYRVVSVLTVLHQDWLNGKEYKCKVSNKALGAPIEKTISKAKGQPREPQVCTLPPSREEMTKNQVSLSCAVKGFYPSDIAVEWESNGQPENNYKTTPPVLDSDGSFFLVSKLTVDKSRWQQGNVFSCSVMHEALHNHYTQKSLSLSPGK

SEQ ID NO: 415 - protein, 232 aa, Artificial Sequence
  PR001991 Chain, PR001992 Chain, PR001993 Chain, PR001994 Chain
EVQLLESGGGLVQPGGSLRLSCAASGFTFNTYAMNWVRQAPGKGLEWVSRIRSKYNNYATYYADSVKDRFTISRDDSKSTLYLQMNSLRAEDTAVYYCVRHGNFGNSYVSWFAYWGQGTLVTVSSRTVAAPSVFIFPPSDEQLKSGTASVVCLLNNFYPREAKVQWKVDNALQSGNSQESVTEQDSKDSTYSLSSTLTLSKADYEKHKVYACEVTHQGLSSPVTKSFNRGEC

SEQ ID NO: 416 - protein, 441 aa, Artificial Sequence
  PR001991 Chain, PR001992 Chain, PR001993 Chain, PR001994 Chain
QAVVTQEPSLTVSPGGTVTLTCRSSTGAVTTSNYANWVQQKPGQAPRGLIGGTNKRAPWTPARFSGSLLGDKAALTLLGAQPEDEAEYFCALWYSNLWVFGGGTKLTVLSSASTKGPSVFPLAPSSKSTSGGTAALGCLVKDYFPEPVTVSWNSGALTSGVHTFPAVLQSSGLYSLSSVVTVPSSSLGTQTYICNVNHKPSNTKVDKKVEPKSCDKTHTCPPCPAPEAAGGPSVFLFPPKPKDTLMISRTPEVTCVVVDVSHEDPEVKFNWYVDGVEVHNAKTKPREEQYNSTYRVVSVLTVLHQDWLNGKEYKCKVSNKALGAPIEKTISKAKGQPREPQVYTLPPCREEMTKNQVSLWCLVKGFYPSDIAVEWESNGQPENNYKTTPPVLDSDGSFFLYSKLTVDKSRWQQGNVFSCSVMHEALHNHYTQKSLSLSPGK

SEQ ID NO: 417 - protein, 228 aa, Artificial Sequence
  PR001995 Chain, PR001996 Chain, PR001997 Chain, PR001998 Chain
EVQLLESGGGLVQPGGSLRLSCAASGFTFNTYAMNWVRQAPGKGLEWVSRIRSKYNNYATYYADSVKDRFTISRDDSKSTLYLQMNSLRAEDTAVYYCVRHGNFGNSYVSWFAYWGQGTLVTVSSASTKGPSVFPLAPSSKSTSGGTAALGCLVKDYFPEPVTVSWNSGALTSGVHTFPAVLQSSGLYSLSSVVTVPSSSLGTQTYICNVNHKPSNTKVDKKVEPKSC

SEQ ID NO: 418 - protein, 442 aa, Artificial Sequence
  PR001995 Chain, PR001996 Chain, PR001997 Chain, PR001998 Chain
QAVVTQEPSLTVSPGGTVTLTCRSSTGAVTTSNYANWVQQKPGQAPRGLIGGTNKRAPWTPARFSGSLLGDKAALTLLGAQPEDEAEYFCALWYSNLWVFGGGTKLTVLGQPKAAPSVTLFPPSSEELQANKATLVCLISDFYPGAVTVAWKADSSPVKAGVETTTPSKQSNNKYAASSYLSLTPEQWKSHRSYSCQVTHEGSTVEKTVAPTECSDKTHTCPPCPAPEAAGGPSVFLFPPKPKDTLMISRTPEVTCVVVDVSHEDPEVKFNWYVDGVEVHNAKTKPREEQYNSTYRVVSVLTVLHQDWLNGKEYKCKVSNKALGAPIEKTISKAKGQPREPQVYTLPPCREEMTKNQVSLWCLVKGFYPSDIAVEWESNGQPENNYKTTPPVLDSDGSFFLYSKLTVDKSRWQQGNVFSCSVMHEALHNHYTQKSLSLSPGK

SEQ ID NO: 419 - protein, 483 aa, Artificial Sequence
  PR001999 Chain, PR002000 Chain, PR002001 Chain, PR002002 Chain
QAVVTQEPSLTVSPGGTVTLTCRSSTGAVTTSNYANWVQQKPGQAPRGLIGGTNKRAPWTPARFSGSLLGDKAALTLLGAQPEDEAEYFCALWYSNLWVFGGGTKLTVLGGGQSGQGGSGGGGSEVQLVESGGGLVQPGGSLKLSCAASGFTFNTYAMNWVRQASGKGLEWVGRIRSKYNNYATYYADSVKDRFTISRDDSKSTLYLQMNSLKTEDTAVYYCVRHGNFGNSYVSWFAYWGQGTLVTVSSASEPKSSDKTHTCPPCPAPEAAGGPSVFLFPPKPKDTLMISRTPEVTCVVVDVSHEDPEVKFNWYVDGVEVHNAKTKPREEQYNSTYRVVSVLTVLHQDWLNGKEYKCKVSNKALGAPIEKTISKAKGQPREPQVYTLPPCREEMTKNQVSLWCLVKGFYPSDIAVEWESNGQPENNYKTTPPVLDSDGSFFLYSKLTVDKSRWQQGNVFSCSVMHEALHNHYTQKSLSLSPGK

SEQ ID NO: 420 - protein, 214 aa, Artificial Sequence
  PR002199 Chain
EIVMTQSPATLSVSPGERATLSCRASQSVSSNLAWYQQKPGQAPRLLIYGASTRATGIPARFSGSGSGTEFTLTISSLQSEDFAVYYCQQYNNWPWTFGQGTKVEIKRTVAAPSVFIFPPSDEQLKSGTASVVCLLNNFYPREAKVQWKVDNALQSGNSQESVTEQDSKDSTYSLSSTLTLSKADYEKHKVYACEVTHQGLSSPVTKSFNRGEC

SEQ ID NO: 421 - protein, 453 aa, Artificial Sequence
  PR002199 Chain
EVQLVESGGGLVQPGRSLRLSCAASGFTFDDYAMHWVRQAPGKGLEWVSGISWNSGSIGYADSVKGRFTISRDNAKNSLYLQMNSLRAEDTALYYCAKDSRGYGDYRLGGAYWGQGTLVTVSSASTKGPSVFPLAPSSKSTSGGTAALGCLVKDYFPEPVTVSWNSGALTSGVHTFPAVLQSSGLYSLSSVVTVPSSSLGTQTYICNVNHKPSNTKVDKKVEPKSCDKTHTCPPCPAPEAAGGPSVFLFPPKPKDTLMISRTPEVTCVVVDVSHEDPEVKFNWYVDGVEVHNAKTKPREEQYNSTYRVVSVLTVLHQDWLNGKEYKCKVSNKALGAPIEKTISKAKGQPREPQVYTLPPCREEMTKNQVSLWCLVKGFYPSDIAVEWESNGQPENNYKTTPPVLDSDGSFFLYSKLTVDKSRWQQGNVFSCSVMHEALHNHYTQKSLSLSPGK

SEQ ID NO: 422 - protein, 477 aa, Artificial Sequence
  PR002199 Chain
EVQLLESGGGLVQPGGSLRLSCAASGFTVSSYGMSWVRQAPGKGPEWVSGIRGSDGSTYYADSVKGRFTISRDNSKNTLYLQMNSLRAEDTAVYYCAKQGENDGPFDHRGQGTLVTVSSGGGGSEVQLLESGGGLVQPGGSLRLSCAASGFTVSSYGMSWVRQAPGKGPEWVSGIRGSDGSTYYADSVKGRFTISRDNSKNTLYLQMNSLRAEDTAVYYCAKQGENDGPFDHRGQGTLVTVSSASEPKSSDKTHTCPPCPAPEAAGGPSVFLFPPKPKDTLMISRTPEVTCVVVDVSHEDPEVKFNWYVDGVEVHNAKTKPREEQYNSTYRVVSVLTVLHQDWLNGKEYKCKVSNKALGAPIEKTISKAKGQPREPQVCTLPPSREEMTKNQVSLSCAVKGFYPSDIAVEWESNGQPENNYKTTPPVLDSDGSFFLVSKLTVDKSRWQQGNVFSCSVMHEALHNHYTQKSLSLSPGK

SEQ ID NO: 423 - protein, 455 aa, Artificial Sequence
  PR002299 Chain, PR002300 Chain, PR002301 Chain, PR002308 Chain, PR002309 Chain, PR002310 Chain, PR002313 Chain, PR002326 Chain, PR002328 Chain, PR002332 Chain
EVQLLESGGGLVQPGGSLRLSCAASGFTFSTYAMNWVRQAPGKGLEWVSRIRSKYNNYATYYADSVKDRFTISRDDSKSTLYLQMNSLRAEDTAVYYCVRHGNFGNSYVSWFAYWGQGTLVTVSSASTKGPSVFPLAPSSKSTSGGTAALGCLVKDYFPEPVTVSWNSGALTSGVHTFPAVLQSSGLYSLSSVVTVPSSSLGTQTYICNVNHKPSNTKVDKKVEPKSCDKTHTCPPCPAPEAAGGPSVFLFPPKPKDTLMISRTPEVTCVVVDVSHEDPEVKFNWYVDGVEVHNAKTKPREEQYNSTYRVVSVLTVLHQDWLNGKEYKCKVSNKALGAPIEKTISKAKGQPREPQVYTLPPCREEMTKNQVSLWCLVKGFYPSDIAVEWESNGQPENNYKTTPPVLDSDGSFFLYSKLTVDKSRWQQGNVFSCSVMHEALHNHYTQKSLSLSPGK

SEQ ID NO: 424 - protein, 487 aa, Artificial Sequence
  PR002299 Chain
EVQLLESGGGLVQPGGSLRLSCAASGFTFSSYAMIWVRQAPGKGLEWVSGISESGGSTYYADSVKGRFTISRDNSKNTLYLQMNSLRAEDTAVYFCVKDLDDILTGYYKDYWGQGTLVTVSSRTGGGGSKLEVQLLESGGGLVQPGGSLRLSCAASGFTFSSYAMIWVRQAPGKGLEWVSGISESGGSTYYADSVKGRFTISRDNSKNTLYLQMNSLRAEDTAVYFCVKDLDDILTGYYKDYWGQGTLVTVSSASEPKSSDKTHTCPPCPAPEAAGGPSVFLFPPKPKDTLMISRTPEVTCVVVDVSHEDPEVKFNWYVDGVEVHNAKTKPREEQYNSTYRVVSVLTVLHQDWLNGKEYKCKVSNKALGAPIEKTISKAKGQPREPQVCTLPPSREEMTKNQVSLSCAVKGFYPSDIAVEWESNGQPENNYKTTPPVLDSDGSFFLVSKLTVDKSRWQQGNVFSCSVMHEALHNHYTQKSLSLSPGK

SEQ ID NO: 425 - protein, 497 aa, Artificial Sequence
  PR002300 Chain
EVQLLESGGGLVQPGGSLRLSCAASGFTFSSYAMIWVRQAPGKGLEWVSGISESGGSTYYADSVKGRFTISRDNSKNTLYLQMNSLRAEDTAVYFCVKDLDDILTGYYKDYWGQGTLVTVSSRTGGGGSGGGGSGGGGSKLEVQLLESGGGLVQPGGSLRLSCAASGFTFSSYAMIWVRQAPGKGLEWVSGISESGGSTYYADSVKGRFTISRDNSKNTLYLQMNSLRAEDTAVYFCVKDLDDILTGYYKDYWGQGTLVTVSSASEPKSSDKTHTCPPCPAPEAAGGPSVFLFPPKPKDTLMISRTPEVTCVVVDVSHEDPEVKFNWYVDGVEVHNAKTKPREEQYNSTYRVVSVLTVLHQDWLNGKEYKCKVSNKALGAPIEKTISKAKGQPREPQVCTLPPSREEMTKNQVSLSCAVKGFYPSDIAVEWESNGQPENNYKTTPPVLDSDGSFFLVSKLTVDKSRWQQGNVFSCSVMHEALHNHYTQKSLSLSPGK

SEQ ID NO: 426 - protein, 507 aa, Artificial Sequence
  PR002301 Chain
EVQLLESGGGLVQPGGSLRLSCAASGFTFSSYAMIWVRQAPGKGLEWVSGISESGGSTYYADSVKGRFTISRDNSKNTLYLQMNSLRAEDTAVYFCVKDLDDILTGYYKDYWGQGTLVTVSSRTGGGGSGGGGSGGGGSGGGGSGGGGSKLEVQLLESGGGLVQPGGSLRLSCAASGFTFSSYAMIWVRQAPGKGLEWVSGISESGGSTYYADSVKGRFTISRDNSKNTLYLQMNSLRAEDTAVYFCVKDLDDILTGYYKDYWGQGTLVTVSSASEPKSSDKTHTCPPCPAPEAAGGPSVFLFPPKPKDTLMISRTPEVTCVVVDVSHEDPEVKFNWYVDGVEVHNAKTKPREEQYNSTYRVVSVLTVLHQDWLNGKEYKCKVSNKALGAPIEKTISKAKGQPREPQVCTLPPSREEMTKNQVSLSCAVKGFYPSDIAVEWESNGQPENNYKTTPPVLDSDGSFFLVSKLTVDKSRWQQGNVFSCSVMHEALHNHYTQKSLSLSPGK

SEQ ID NO: 427 - protein, 487 aa, Artificial Sequence
  PR002308 Chain
EVQLVETGGGLIQPGGSLRLSCAASGFTVSDNYMTWVRQAPGKGLEWVSVIFSGGNTYYADSVKGRFTISRDNAKNTLYLQMNSLRAEDTALYYCARRNYDDTRGTDVFDIWGQGTMVTVSSRTGGGGSKLEVQLVETGGGLIQPGGSLRLSCAASGFTVSDNYMTWVRQAPGKGLEWVSVIFSGGNTYYADSVKGRFTISRDNAKNTLYLQMNSLRAEDTALYYCARRNYDDTRGTDVFDIWGQGTMVTVSSASEPKSSDKTHTCPPCPAPEAAGGPSVFLFPPKPKDTLMISRTPEVTCVVVDVSHEDPEVKFNWYVDGVEVHNAKTKPREEQYNSTYRVVSVLTVLHQDWLNGKEYKCKVSNKALGAPIEKTISKAKGQPREPQVCTLPPSREEMTKNQVSLSCAVKGFYPSDIAVEWESNGQPENNYKTTPPVLDSDGSFFLVSKLTVDKSRWQQGNVFSCSVMHEALHNHYTQKSLSLSPGK

SEQ ID NO: 428 - protein, 497 aa, Artificial Sequence
  PR002309 Chain, PR002867 Chain, PR002868 Chain, PR002869 Chain, PR002870 Chain
EVQLVETGGGLIQPGGSLRLSCAASGFTVSDNYMTWVRQAPGKGLEWVSVIFSGGNTYYADSVKGRFTISRDNAKNTLYLQMNSLRAEDTALYYCARRNYDDTRGTDVFDIWGQGTMVTVSSRTGGGGSGGGGSGGGGSKLEVQLVETGGGLIQPGGSLRLSCAASGFTVSDNYMTWVRQAPGKGLEWVSVIFSGGNTYYADSVKGRFTISRDNAKNTLYLQMNSLRAEDTALYYCARRNYDDTRGTDVFDIWGQGTMVTVSSASEPKSSDKTHTCPPCPAPEAAGGPSVFLFPPKPKDTLMISRTPEVTCVVVDVSHEDPEVKFNWYVDGVEVHNAKTKPREEQYNSTYRVVSVLTVLHQDWLNGKEYKCKVSNKALGAPIEKTISKAKGQPREPQVCTLPPSREEMTKNQVSLSCAVKGFYPSDIAVEWESNGQPENNYKTTPPVLDSDGSFFLVSKLTVDKSRWQQGNVFSCSVMHEALHNHYTQKSLSLSPGK

SEQ ID NO: 429 - protein, 507 aa, Artificial Sequence
  PR002310 Chain
EVQLVETGGGLIQPGGSLRLSCAASGFTVSDNYMTWVRQAPGKGLEWVSVIFSGGNTYYADSVKGRFTISRDNAKNTLYLQMNSLRAEDTALYYCARRNYDDTRGTDVFDIWGQGTMVTVSSRTGGGGSGGGGSGGGGSGGGGSGGGGSKLEVQLVETGGGLIQPGGSLRLSCAASGFTVSDNYMTWVRQAPGKGLEWVSVIFSGGNTYYADSVKGRFTISRDNAKNTLYLQMNSLRAEDTALYYCARRNYDDTRGTDVFDIWGQGTMVTVSSASEPKSSDKTHTCPPCPAPEAAGGPSVFLFPPKPKDTLMISRTPEVTCVVVDVSHEDPEVKFNWYVDGVEVHNAKTKPREEQYNSTYRVVSVLTVLHQDWLNGKEYKCKVSNKALGAPIEKTISKAKGQPREPQVCTLPPSREEMTKNQVSLSCAVKGFYPSDIAVEWESNGQPENNYKTTPPVLDSDGSFFLVSKLTVDKSRWQQGNVFSCSVMHEALHNHYTQKSLSLSPGK

SEQ ID NO: 430 - protein, 495 aa, Artificial Sequence
  PR002313 Chain
EVQLLESGGGLVQPGGSLRLSCAASGFTFSSYAMIWVRQAPGKGLEWVSGISESGGSTYYADSVKGRFTISRDNSKNTLYLQMNSLRAEDTAVYFCVKDLDDILTGYYKDYWGQGTLVTVSSRTGGGGSGGGGSGGGGSKLEVQLVETGGGLIQPGGSLRLSCAASGFPVSSNYMSWVRQAPGKGLEWVSVIFSGGRTYYADSVKGRFTISRDNSKNTLYLQMNSLRAEDTAVYYCARRNWIDGRDAFDIWGQGTMVTVSSASEPKSSDKTHTCPPCPAPEAAGGPSVFLFPPKPKDTLMISRTPEVTCVVVDVSHEDPEVKFNWYVDGVEVHNAKTKPREEQYNSTYRVVSVLTVLHQDWLNGKEYKCKVSNKALGAPIEKTISKAKGQPREPQVCTLPPSREEMTKNQVSLSCAVKGFYPSDIAVEWESNGQPENNYKTTPPVLDSDGSFFLVSKLTVDKSRWQQGNVFSCSVMHEALHNHYTQKSLSLSPGK

SEQ ID NO: 431 - protein, 495 aa, Artificial Sequence
  PR002326 Chain
EVQLVETGGGLIQPGGSLRLSCAASGFTVSSNYMTWVRQAPGKGLEWVSVIFSGGSTYYADSVKGRFTISRDNSKNTLYLQMNSLRAEDTAVYYCARRIAVAGHDVFDIWGQGTMVTVSSRTGGGGSGGGGSGGGGSKLEVQLVETGGGLIQPGGSLRLSCAASGFTVSDNYMTWVRQAPGKGLEWVSVIFSGGNTYYADSVKGRFTISRDNAKNTLYLQMNSLRAEDTALYYCARRNYDDTRGTDVFDIWGQGTMVTVSSASEPKSSDKTHTCPPCPAPEAAGGPSVFLFPPKPKDTLMISRTPEVTCVVVDVSHEDPEVKFNWYVDGVEVHNAKTKPREEQYNSTYRVVSVLTVLHQDWLNGKEYKCKVSNKALGAPIEKTISKAKGQPREPQVCTLPPSREEMTKNQVSLSCAVKGFYPSDIAVEWESNGQPENNYKTTPPVLDSDGSFFLVSKLTVDKSRWQQGNVFSCSVMHEALHNHYTQKSLSLSPGK

SEQ ID NO: 432 - protein, 505 aa, Artificial Sequence
  PR002328 Chain
EVQLVETGGGLIQPGGSLRLSCAASGFTVSSNYMTWVRQAPGKGLEWVSVIFSGGSTYYADSVKGRFTISRDNSKNTLYLQMNSLRAEDTAVYYCARRIAVAGHDVFDIWGQGTMVTVSSRTGGGGSGGGGSGGGGSGGGGSGGGGSKLEVQLVETGGGLIQPGGSLRLSCAASGFTVSDNYMTWVRQAPGKGLEWVSVIFSGGNTYYADSVKGRFTISRDNAKNTLYLQMNSLRAEDTALYYCARRNYDDTRGTDVFDIWGQGTMVTVSSASEPKSSDKTHTCPPCPAPEAAGGPSVFLFPPKPKDTLMISRTPEVTCVVVDVSHEDPEVKFNWYVDGVEVHNAKTKPREEQYNSTYRVVSVLTVLHQDWLNGKEYKCKVSNKALGAPIEKTISKAKGQPREPQVCTLPPSREEMTKNQVSLSCAVKGFYPSDIAVEWESNGQPENNYKTTPPVLDSDGSFFLVSKLTVDKSRWQQGNVFSCSVMHEALHNHYTQKSLSLSPGK

SEQ ID NO: 433 - protein, 495 aa, Artificial Sequence
  PR002332 Chain
EVQLVETGGGLIQPGGSLRLSCAASGFTVSDNYMTWVRQAPGKGLEWVSVIFSGGNTYYADSVKGRFTISRDNAKNTLYLQMNSLRAEDTALYYCARRNYDDTRGTDVFDIWGQGTMVTVSSRTGGGGSGGGGSGGGGSKLEVQLVETGGGLIQPGGSLRLSCAASGFTVSSNYMTWVRQAPGKGLEWVSVIFSGGSTYYADSVKGRFTISRDNSKNTLYLQMNSLRAEDTAVYYCARRIAVAGHDVFDIWGQGTMVTVSSASEPKSSDKTHTCPPCPAPEAAGGPSVFLFPPKPKDTLMISRTPEVTCVVVDVSHEDPEVKFNWYVDGVEVHNAKTKPREEQYNSTYRVVSVLTVLHQDWLNGKEYKCKVSNKALGAPIEKTISKAKGQPREPQVCTLPPSREEMTKNQVSLSCAVKGFYPSDIAVEWESNGQPENNYKTTPPVLDSDGSFFLVSKLTVDKSRWQQGNVFSCSVMHEALHNHYTQKSLSLSPGK

SEQ ID NO: 434 - protein, 475 aa, Artificial Sequence
  PR002666 Chain, PR002670 Chain
EVQLVESGGGLIQPGGSLRLSCAVSGFTVSKNYMSWVRQAPGKGLEWVSVVYSGGSKTYADSVKGRFTISRDNSKNTLYLQMNSLRAEDTAVYYCARAVPHSPSSFDIWGQGTMVTVSSGGGGSEVQLVESGGGLIQPGGSLRLSCAVSGFTVSKNYMSWVRQAPGKGLEWVSVVYSGGSKTYADSVKGRFTISRDNSKNTLYLQMNSLRAEDTAVYYCARAVPHSPSSFDIWGQGTMVTVSSEPKSSDKTHTCPPCPAPELLGGPSVFLFPPKPKDTLMISRTPEVTCVVVDVSHEDPEVKFNWYVDGVEVHNAKTKPREEQYNSTYRVVSVLTVLHQDWLNGKEYKCKVSNKALPAPIEKTISKAKGQPREPQVCTLPPSREEMTKNQVSLSCAVKGFYPSDIAVEWESNGQPENNYKTTPPVLDSDGSFFLVSKLTVDKSRWQQGNVFSCSVMHEALHNHYTQKSLSLSPGK

SEQ ID NO: 435 - protein, 485 aa, Artificial Sequence
  PR002667 Chain, PR002671 Chain
EVQLVESGGGLIQPGGSLRLSCAVSGFTVSKNYMSWVRQAPGKGLEWVSVVYSGGSKTYADSVKGRFTISRDNSKNTLYLQMNSLRAEDTAVYYCARAVPHSPSSFDIWGQGTMVTVSSGGGGSGGGGSGGGGSEVQLVESGGGLIQPGGSLRLSCAVSGFTVSKNYMSWVRQAPGKGLEWVSVVYSGGSKTYADSVKGRFTISRDNSKNTLYLQMNSLRAEDTAVYYCARAVPHSPSSFDIWGQGTMVTVSSEPKSSDKTHTCPPCPAPELLGGPSVFLFPPKPKDTLMISRTPEVTCVVVDVSHEDPEVKFNWYVDGVEVHNAKTKPREEQYNSTYRVVSVLTVLHQDWLNGKEYKCKVSNKALPAPIEKTISKAKGQPREPQVCTLPPSREEMTKNQVSLSCAVKGFYPSDIAVEWESNGQPENNYKTTPPVLDSDGSFFLVSKLTVDKSRWQQGNVFSCSVMHEALHNHYTQKSLSLSPGK

SEQ ID NO: 436 - protein, 475 aa, Artificial Sequence
  PR002668 Chain, PR002672 Chain
EVQLVESGGGLIQPGGSLRLSCAVSGFTVSKNYMSWVRQAPGKGLEWVSVVYSGGSKTYADSVKGRFTISRDNSKNTLYLQMNSLRAEDTAVYYCARAVPHSPSSFDIWGQGTMVTVSSGGGGSEVQLVESGGGLIQPGGSLRLSCAVSGFTVSKNYMSWVRQAPGKGLEWVSVVYSGGSKTYADSVKGRFTISRDNSKNTLYLQMNSLRAEDTAVYYCARAVPHSPSSFDIWGQGTMVTVSSEPKSSDKTHTCPPCPAPELLGGPDVFLFPPKPKDTLMISRTPEVTCVVVDVSHEDPEVKFNWYVDGVEVHNAKTKPREEQYNSTYRVVSVLTVLHQDWLNGKEYKCKVSNKALPAPEEKTISKAKGQPREPQVCTLPPSREEMTKNQVSLSCAVKGFYPSDIAVEWESNGQPENNYKTTPPVLDSDGSFFLVSKLTVDKSRWQQGNVFSCSVMHEALHNHYTQKSLSLSPGK

SEQ ID NO: 437 - protein, 485 aa, Artificial Sequence
  PR002669 Chain, PR002673 Chain
EVQLVESGGGLIQPGGSLRLSCAVSGFTVSKNYMSWVRQAPGKGLEWVSVVYSGGSKTYADSVKGRFTISRDNSKNTLYLQMNSLRAEDTAVYYCARAVPHSPSSFDIWGQGTMVTVSSGGGGSGGGGSGGGGSEVQLVESGGGLIQPGGSLRLSCAVSGFTVSKNYMSWVRQAPGKGLEWVSVVYSGGSKTYADSVKGRFTISRDNSKNTLYLQMNSLRAEDTAVYYCARAVPHSPSSFDIWGQGTMVTVSSEPKSSDKTHTCPPCPAPELLGGPDVFLFPPKPKDTLMISRTPEVTCVVVDVSHEDPEVKFNWYVDGVEVHNAKTKPREEQYNSTYRVVSVLTVLHQDWLNGKEYKCKVSNKALPAPEEKTISKAKGQPREPQVCTLPPSREEMTKNQVSLSCAVKGFYPSDIAVEWESNGQPENNYKTTPPVLDSDGSFFLVSKLTVDKSRWQQGNVFSCSVMHEALHNHYTQKSLSLSPGK

SEQ ID NO: 438 - protein, 441 aa, Artificial Sequence
  PR002670 Chain, PR002671 Chain
DIQMTQSPSSLSASVGDRVTITCRASQDVNTAVAWYQQKPGKAPKLLIYSASFLYSGVPSRFSGSRSGTDFTLTISSLQPEDFATYYCQQHYTTPPTFGQGTKVEIKRTVAAPSVFIFPPSDEQLKSGTASVVCLLNNFYPREAKVQWKVDNALQSGNSQESVTEQDSKDSTYSLSSTLTLSKADYEKHKVYACEVTHQGLSSPVTKSFNRGECDKTHTCPPCPAPELLGGPSVFLFPPKPKDTLMISRTPEVTCVVVDVSHEDPEVKFNWYVDGVEVHNAKTKPREEQYNSTYRVVSVLTVLHQDWLNGKEYKCKVSNKALPAPIEKTISKAKGQPREPQVYTLPPCREEMTKNQVSLWCLVKGFYPSDIAVEWESNGQPENNYKTTPPVLDSDGSFFLYSKLTVDKSRWQQGNVFSCSVMHEALHNHYTQKSLSLSPGK

SEQ ID NO: 439 - protein, 441 aa, Artificial Sequence
  PR002672 Chain, PR002673 Chain
DIQMTQSPSSLSASVGDRVTITCRASQDVNTAVAWYQQKPGKAPKLLIYSASFLYSGVPSRFSGSRSGTDFTLTISSLQPEDFATYYCQQHYTTPPTFGQGTKVEIKRTVAAPSVFIFPPSDEQLKSGTASVVCLLNNFYPREAKVQWKVDNALQSGNSQESVTEQDSKDSTYSLSSTLTLSKADYEKHKVYACEVTHQGLSSPVTKSFNRGECDKTHTCPPCPAPELLGGPDVFLFPPKPKDTLMISRTPEVTCVVVDVSHEDPEVKFNWYVDGVEVHNAKTKPREEQYNSTYRVVSVLTVLHQDWLNGKEYKCKVSNKALPAPEEKTISKAKGQPREPQVYTLPPCREEMTKNQVSLWCLVKGFYPSDIAVEWESNGQPENNYKTTPPVLDSDGSFFLYSKLTVDKSRWQQGNVFSCSVMHEALHNHYTQKSLSLSPGK

SEQ ID NO: 440 - protein, 474 aa, Artificial Sequence
  PR002867 Chain
QVQLVQSGGGVVQPGRSLRLSCAASGFTFSSYGMHWVRQAPGKGLEWVAVIYYDGRNKYYADSVKGRFTISRDNSKNMLYLQMNGLRAEDTAVYYCARGPGYNWLDPWGQGTLVTVSSGGGGSGGGGSGGGGSEIVLTQSPATLSVSPGERATLSCRASQSVSSNLAWYQQKPGQAPRLLIYGASTRATGIPARFSGSGSGTEFTLTISSLQSEDVATYYCQKYNSAPLTFGGGTKLEIKASEPKSSDKTHTCPPCPAPEAAGGPSVFLFPPKPKDTLMISRTPEVTCVVVDVSHEDPEVKFNWYVDGVEVHNAKTKPREEQYNSTYRVVSVLTVLHQDWLNGKEYKCKVSNKALGAPIEKTISKAKGQPREPQVYTLPPCREEMTKNQVSLWCLVKGFYPSDIAVEWESNGQPENNYKTTPPVLDSDGSFFLYSKLTVDKSRWQQGNVFSCSVMHEALHNHYTQKSLSLSPGK

SEQ ID NO: 441 - protein, 474 aa, Artificial Sequence
  PR002868 Chain
QVQLVQSGGGVVQPGRSLRLSCAASGFTFRSYGMHWVRQAPGKGLEWVAIIYYDGSNKYYADSVKGRFTISRDNSKNTLYLQMNSLRAEDTAVYYCARGLGYNWFDPWGQGTLVTVSSGGGGSGGGGSGGGGSDIQLTQSPSSLSASVGDRVTITCRASQSISSYLNWYQQKPGKAPKLLIYAASSLQSGVPSRFSGSGSGTDFTLTISSLQPEDFATYYCQQSYRTPLTFGGGTKVEIKASEPKSSDKTHTCPPCPAPEAAGGPSVFLFPPKPKDTLMISRTPEVTCVVVDVSHEDPEVKFNWYVDGVEVHNAKTKPREEQYNSTYRVVSVLTVLHQDWLNGKEYKCKVSNKALGAPIEKTISKAKGQPREPQVYTLPPCREEMTKNQVSLWCLVKGFYPSDIAVEWESNGQPENNYKTTPPVLDSDGSFFLYSKLTVDKSRWQQGNVFSCSVMHEALHNHYTQKSLSLSPGK

SEQ ID NO: 442 - protein, 474 aa, Artificial Sequence
  PR002869 Chain
QVQLVESGGGVVQPGRSLRLSCAASGFTFRSYGMHWVRQAPGKGLEWVGMIYYNGKNKYYADSVKGRFTISRDNSRNTLYLQMNGLRAEDTAVYYCARGPGYNWLDPWGQGTLVTVSSGGGGSGGGGSGGGGSEIVLTQSPATLSVSPGERATLSCRASQSVSSNLAWYQQKPGQAPRLLIYGASTRATGIPARFSGSGSGTEFTLTISSLQSEDFAVYYCQQYNNWPLTFGGGTKVEIKASEPKSSDKTHTCPPCPAPEAAGGPSVFLFPPKPKDTLMISRTPEVTCVVVDVSHEDPEVKFNWYVDGVEVHNAKTKPREEQYNSTYRVVSVLTVLHQDWLNGKEYKCKVSNKALGAPIEKTISKAKGQPREPQVYTLPPCREEMTKNQVSLWCLVKGFYPSDIAVEWESNGQPENNYKTTPPVLDSDGSFFLYSKLTVDKSRWQQGNVFSCSVMHEALHNHYTQKSLSLSPGK

SEQ ID NO: 443 - protein, 474 aa, Artificial Sequence
  PR002870 Chain
QVQLVQSGGGVVQPGRSLRLSCAASGFTFRSYGMHWVRQAPGKGLEWVAIIYYDGSNKYYADSVKGRFTISRDNSKNTLYLQMNSLRAEDTAVYYCARGLGYNWFDPWGQGTLVTVSSGGGGSGGGGSGGGGSDIVMTQSPSSLSASVGDRVTITCRASQGISNYLAWYQQKPGKVPKLLIYAASTLQSGVPSRFSGSGSGTDFTLTISSLQPEDVATYYCQKYNSAPYTFGQGTKVEIKASEPKSSDKTHTCPPCPAPEAAGGPSVFLFPPKPKDTLMISRTPEVTCVVVDVSHEDPEVKFNWYVDGVEVHNAKTKPREEQYNSTYRVVSVLTVLHQDWLNGKEYKCKVSNKALGAPIEKTISKAKGQPREPQVYTLPPCREEMTKNQVSLWCLVKGFYPSDIAVEWESNGQPENNYKTTPPVLDSDGSFFLYSKLTVDKSRWQQGNVFSCSVMHEALHNHYTQKSLSLSPGK

SEQ ID NO: 444 - protein, 455 aa, Artificial Sequence
  PR002892 Chain, PR002895 Chain, PR002898 Chain, PR002901 Chain, PR002929 Chain
EVQLLESGGGLVQPGGSLRLSCAASGFTFSTYAMNWVRQAPGKGLEWVSRIRSKYNNYATYYADSVKDRFTISRDDSKSTLYLQMNSLRAEDTAVYYCVRHGNFGNSYVSWFAYWGQGTLVTVSSASTKGPSVFPLAPSSKSTSGGTAALGCLVKDYFPEPVTVSWNSGALTSGVHTFPAVLQSSGLYSLSSVVTVPSSSLGTQTYICNVNHKPSNTKVDKKVEPKSCDKTHTCPPCPAPEAAGGPSVFLFPPKPKDTLMISRTPEVTCVVVDVSHEDPEVKFNWYVDGVEVHNAKTKPREEQYNSTYRVVSVLTVLHQDWLNGKEYKCKVSNKALPAPIEKTISKAKGQPREPQVYTLPPCREEMTKNQVSLWCLVKGFYPSDIAVEWESNGQPENNYKTTPPVLDSDGSFFLYSKLTVDKSRWQQGNVFSCSVMHEALHNHYTQKSLSLSPGK

SEQ ID NO: 445 - protein, 483 aa, Artificial Sequence
  PR002892 Chain, PR002950 Chain, PR003177 Chain
EVQLVETGGGLIQPGGSLRLSCAASGFTVSDNYMTWVRQAPGKGLEWVSVIFSGGNTYYADSVKGRFTISRDNAKNTLYLQMNSLRAEDTALYYCARRNYDDTRGTDVFDIWGQGTMVTVSSGGGGSEVQLVETGGGLIQPGGSLRLSCAASGFTVSDNYMTWVRQAPGKGLEWVSVIFSGGNTYYADSVKGRFTISRDNAKNTLYLQMNSLRAEDTALYYCARRNYDDTRGTDVFDIWGQGTMVTVSSASEPKSSDKTHTCPPCPAPEAAGGPSVFLFPPKPKDTLMISRTPEVTCVVVDVSHEDPEVKFNWYVDGVEVHNAKTKPREEQYNSTYRVVSVLTVLHQDWLNGKEYKCKVSNKALPAPIEKTISKAKGQPREPQVCTLPPSREEMTKNQVSLSCAVKGFYPSDIAVEWESNGQPENNYKTTPPVLDSDGSFFLVSKLTVDKSRWQQGNVFSCSVMHEALHNHYTQKSLSLSPGK

SEQ ID NO: 446 - protein, 493 aa, Artificial Sequence
  PR002895 Chain, PR002953 Chain, PR003178 Chain
EVQLVETGGGLIQPGGSLRLSCAASGFTVSDNYMTWVRQAPGKGLEWVSVIFSGGNTYYADSVKGRFTISRDNAKNTLYLQMNSLRAEDTALYYCARRNYDDTRGTDVFDIWGQGTMVTVSSGGGGSGGGGSGGGGSEVQLVETGGGLIQPGGSLRLSCAASGFTVSDNYMTWVRQAPGKGLEWVSVIFSGGNTYYADSVKGRFTISRDNAKNTLYLQMNSLRAEDTALYYCARRNYDDTRGTDVFDIWGQGTMVTVSSASEPKSSDKTHTCPPCPAPEAAGGPSVFLFPPKPKDTLMISRTPEVTCVVVDVSHEDPEVKFNWYVDGVEVHNAKTKPREEQYNSTYRVVSVLTVLHQDWLNGKEYKCKVSNKALPAPIEKTISKAKGQPREPQVCTLPPSREEMTKNQVSLSCAVKGFYPSDIAVEWESNGQPENNYKTTPPVLDSDGSFFLVSKLTVDKSRWQQGNVFSCSVMHEALHNHYTQKSLSLSPGK

SEQ ID NO: 447 - protein, 480 aa, Artificial Sequence
  PR002898 Chain, PR002956 Chain
EVQLVETGGGLIQPGGSLRLSCAASGFTVSDNYMTWVRQAPGKGLEWVSVIFSGGNTYYADSVKGRFTISRDNAKNTLYLQMNSLRAEDTALYYCARRNYDDTRGTDVFDIWGQGTMVTVSSGSEVQLVETGGGLIQPGGSLRLSCAASGFTVSDNYMTWVRQAPGKGLEWVSVIFSGGNTYYADSVKGRFTISRDNAKNTLYLQMNSLRAEDTALYYCARRNYDDTRGTDVFDIWGQGTMVTVSSASEPKSSDKTHTCPPCPAPEAAGGPSVFLFPPKPKDTLMISRTPEVTCVVVDVSHEDPEVKFNWYVDGVEVHNAKTKPREEQYNSTYRVVSVLTVLHQDWLNGKEYKCKVSNKALPAPIEKTISKAKGQPREPQVCTLPPSREEMTKNQVSLSCAVKGFYPSDIAVEWESNGQPENNYKTTPPVLDSDGSFFLVSKLTVDKSRWQQGNVFSCSVMHEALHNHYTQKSLSLSPGK

SEQ ID NO: 448 - protein, 482 aa, Artificial Sequence
  PR002901 Chain, PR002959 Chain
EVQLVETGGGLIQPGGSLRLSCAASGFTVSDNYMTWVRQAPGKGLEWVSVIFSGGNTYYADSVKGRFTISRDNAKNTLYLQMNSLRAEDTALYYCARRNYDDTRGTDVFDIWGQGTMVTVSSGSGSEVQLVETGGGLIQPGGSLRLSCAASGFTVSDNYMTWVRQAPGKGLEWVSVIFSGGNTYYADSVKGRFTISRDNAKNTLYLQMNSLRAEDTALYYCARRNYDDTRGTDVFDIWGQGTMVTVSSASEPKSSDKTHTCPPCPAPEAAGGPSVFLFPPKPKDTLMISRTPEVTCVVVDVSHEDPEVKFNWYVDGVEVHNAKTKPREEQYNSTYRVVSVLTVLHQDWLNGKEYKCKVSNKALPAPIEKTISKAKGQPREPQVCTLPPSREEMTKNQVSLSCAVKGFYPSDIAVEWESNGQPENNYKTTPPVLDSDGSFFLVSKLTVDKSRWQQGNVFSCSVMHEALHNHYTQKSLSLSPGK

SEQ ID NO: 449 - protein, 356 aa, Artificial Sequence
  PR002929 Chain, PR002935 Chain
EVQLVETGGGLIQPGGSLRLSCAASGFTVSDNYMTWVRQAPGKGLEWVSVIFSGGNTYYADSVKGRFTISRDNAKNTLYLQMNSLRAEDTALYYCARRNYDDTRGTDVFDIWGQGTMVTVSSASEPKSSDKTHTCPPCPAPEAAGGPSVFLFPPKPKDTLMISRTPEVTCVVVDVSHEDPEVKFNWYVDGVEVHNAKTKPREEQYNSTYRVVSVLTVLHQDWLNGKEYKCKVSNKALPAPIEKTISKAKGQPREPQVCTLPPSREEMTKNQVSLSCAVKGFYPSDIAVEWESNGQPENNYKTTPPVLDSDGSFFLVSKLTVDKSRWQQGNVFSCSVMHEALHNHYTQKSLSLSPGK

SEQ ID NO: 450 - protein, 455 aa, Artificial Sequence
  PR002935 Chain, PR002950 Chain, PR002953 Chain, PR002956 Chain, PR002959 Chain
EVQLLESGGGLVQPGGSLRLSCAASGFTFSTYAMNWVRQAPGKGLEWVSRIRSKYNNYATYYADSVKDRFTISRDNSKNTLYLQMNSLRAEDTAVYYCAKHGNFGNSYVSWFAYWGQGTLVTVSSASTKGPSVFPLAPSSKSTSGGTAALGCLVKDYFPEPVTVSWNSGALTSGVHTFPAVLQSSGLYSLSSVVTVPSSSLGTQTYICNVNHKPSNTKVDKKVEPKSCDKTHTCPPCPAPEAAGGPSVFLFPPKPKDTLMISRTPEVTCVVVDVSHEDPEVKFNWYVDGVEVHNAKTKPREEQYNSTYRVVSVLTVLHQDWLNGKEYKCKVSNKALPAPIEKTISKAKGQPREPQVYTLPPCREEMTKNQVSLWCLVKGFYPSDIAVEWESNGQPENNYKTTPPVLDSDGSFFLYSKLTVDKSRWQQGNVFSCSVMHEALHNHYTQKSLSLSPGK

SEQ ID NO: 451 - protein, 221 aa, Artificial Sequence
  PR003052 Chain
EVQLVESGGGLVQPGGSLRLSCAASGFTFSDSWIHWVRQAPGKGLEWVAWISPYGGSTYYADSVKGRFTISADTSKNTAYLQMNSLRAEDTAVYYCARRHWPGGFDYWGQGTLVTVSSASTKGPSVFPLAPSSKSTSGGTAALGCLVKDYFPEPVTVSWNSGALTSGVHTFPAVLQSSGLYSLSSVVTVPSSSLGTQTYICNVNHKPSNTKVDKKVEPKSC

SEQ ID NO: 452 - protein, 656 aa, Artificial Sequence
  PR003052 Chain
DIQMTQSPSSLSASVGDRVTITCRASQDVSTAVAWYQQKPGKAPKLLIYSASFLYSGVPSRFSGSGSGTDFTLTISSLQPEDFATYYCQQYLYHPATFGQGTKVEIKRTVAAPSVFIFPPSDEQLKSGTASVVCLLNNFYPREAKVQWKVDNALQSGNSQESVTEQDSKDSTYSLSSTLTLSKADYEKHKVYACEVTHQGLSSPVTKSFNRGECQVQLQQWGAGLLKPSETLSLTCAVYGGSFSGYYWSWIRQPPGKGLEWIGEIQHSGSTDSNPSLKGRVTFSVDTSKNQFSLKLNSVTAADTAVYYCARLTGPFDYWGQGTLVTVSSASTKGPSVFPLAPCSRSTSESTAALGCLVKDYFPEPVTVSWNSGALTSGVHTFPAVLQSSGLYSLSSVVTVPSSSLGTKTYTCNVDHKPSNTKVDKRVESKYGPPCPPCPAPEFLGGPSVFLFPPKPKDTLMISRTPEVTCVVVDVSQEDPEVQFNWYVDGVEVHNAKTKPREEQFNSTYRVVSVLTVLHQDWLNGKEYKCKVSNKGLPSSIEKTISKAKGQPREPQVYTLPPSQEEMTKNQVSLTCLVKGFYPSDIAVEWESNGQPENNYKTTPPVLDSDGSFFLYSRLTVDKSRWQEGNVFSCSVMHEALHNHYTQKSLSLSLGK

SEQ ID NO: 453 - protein, 984 aa, Artificial Sequence
  PR003106 Chain
QVQLVQSGAEVKKPGASVKVSCKASGYTFTNHIIHWVRQAPGQCLEWMGYINPYPGYHAYNEKFQGRATMTSDTSTSTVYMELSSLRSEDTAVYYCARDGYYRDTDVLDYWGQGTLVTVSSGGGGSGGGGSGGGGSDIQMTQSPSSLSASVGDRVTITCQASQDISNYLNWYQQKPGKAPKLLIYYTSRLHTGVPSRFSGSGSGTDFTFTISSLEPEDIATYYCQQGNTLPWTFGCGTKLEIKSGGGGSEVQLVESGGGLVQPGGSLKLSCAASGFTFNKYAMNWVRQAPGKGLEWVARIRSKYNNYATYYADSVKDRFTISRDDSKNTAYLQMNNLKTEDTAVYYCVRHGNFGNSYISYWAYWGQGTLVTVSSGGGGSGGGGSGGGGSQTVVTQEPSLTVSPGGTVTLTCGSSTGAVTSGNYPNWVQQKPGQAPRGLIGGTKFLAPGTPARFSGSLLGGKAALTLSGVQPEDEAEYYCVLWYSNRWVFGGGTKLTVLGGGGDKTHTCPPCPAPELLGGPSVFLFPPKPKDTLMISRTPEVTCVVVDVSHEDPEVKFNWYVDGVEVHNAKTKPCEEQYGSTYRCVSVLTVLHQDWLNGKEYKCKVSNKALPAPIEKTISKAKGQPREPQVYTLPPSREEMTKNQVSLTCLVKGFYPSDIAVEWESNGQPENNYKTTPPVLDSDGSFFLYSKLTVDKSRWQQGNVFSCSVMHEALHNHYTQKSLSLSPGGGGSGGGGSGGGGSGGGGSGGGGSGGGGSDKTHTCPPCPAPELLGGPSVFLFPPKPKDTLMISRTPEVTCVVVDVSHEDPEVKFNWYVDGVEVHNAKTKPCEEQYGSTYRCVSVLTVLHQDWLNGKEYKCKVSNKALPAPIEKTISKAKGQPREPQVYTLPPSREEMTKNQVSLTCLVKGFYPSDIAVEWESNGQPENNYKTTPPVLDSDGSFFLYSKLTVDKSRWQQGNVFSCSVMHEALHNHYTQKSLSLSPGK

SEQ ID NO: 454 - protein, 455 aa, Artificial Sequence
  PR003177 Chain, PR003178 Chain, PR003867 Chain, PR003868 Chain, PR003869 Chain, PR003870 Chain, PR003871 Chain, PR003872 Chain, PR003873 Chain, PR003874 Chain, PR003875 Chain, PR003876 Chain, PR003877
EVQLVESGGGLVQPGGSLKLSCAASGFTFSTYAMNWVRQASGKGLEWVGRIRSKYNNYATYYADSVKDRFTISRDDSKNTAYLQMNSLKTEDTAVYYCTRHGNFGNSYVSWFAYWGQGTLVTVSSASTKGPSVFPLAPSSKSTSGGTAALGCLVKDYFPEPVTVSWNSGALTSGVHTFPAVLQSSGLYSLSSVVTVPSSSLGTQTYICNVNHKPSNTKVDKKVEPKSCDKTHTCPPCPAPEAAGGPSVFLFPPKPKDTLMISRTPEVTCVVVDVSHEDPEVKFNWYVDGVEVHNAKTKPREEQYNSTYRVVSVLTVLHQDWLNGKEYKCKVSNKALPAPIEKTISKAKGQPREPQVYTLPPCREEMTKNQVSLWCLVKGFYPSDIAVEWESNGQPENNYKTTPPVLDSDGSFFLYSKLTVDKSRWQQGNVFSCSVMHEALHNHYTQKSLSLSPGK

SEQ ID NO: 455 - protein, 589 aa, Artificial Sequence
  PR003334 Chain
QVQLVESGGGVVQPGRSLRLSCAASGFTFRSFGMHWVRQAPGKGLEWVAVISYDASNEYYADSVKGRFIISRDNSKDTLYLQMNSLRAGDTAVYYCAKGGGLRWYFAYWGQGTLVTVSSASTKGPSVFPLAPSSKSTSGGTAALGCLVKDYFPEPVTVSWNSGALTSGVHTFPAVLQSSGLYSLSSVVTVPSSSLGTQTYICNVNHKPSNTKVDKKVEPKSCDKTHTCPPCPAPEAAGGPSVFLFPPKPKDTLMISRTPEVTCVVVDVSHEDPEVKFNWYVDGVEVHNAKTKPREEQYNSTYRVVSVLTVLHQDWLNGKEYKCKVSNKALPAPIEKTISKAKGQPREPQVYTLPPSREEMTKNQVSLTCLVKGFYPSDIAVEWESNGQPENNYKTTPPVLDSDGSFFLYSKLTVDKSRWQQGNVFSCSVMHEALHNHYTQKSLSLSPGEPKSSDKTHTPPPPPRTEVQLLESGGGLVQLGGSLRLSCAASGFTFSRYAMTWVRQAPEKGLEWVSSISGSGDDTYYGDSVKGRFTISRDNSQNTVYLQMNSLRAEDTAVYFCAKEKAGTTGDYYYNVDVWGQGTTVTVSS

SEQ ID NO: 456 - protein, 589 aa, Artificial Sequence
  PR003335 Chain
QVQLVESGGGVVQPGRSLRLSCAASGFTFRSFGMHWVRQAPGKGLEWVAVISYDASNEYYADSVKGRFIISRDNSKDTLYLQMNSLRAGDTAVYYCAKGGGLRWYFAYWGQGTLVTVSSASTKGPSVFPLAPSSKSTSGGTAALGCLVKDYFPEPVTVSWNSGALTSGVHTFPAVLQSSGLYSLSSVVTVPSSSLGTQTYICNVNHKPSNTKVDKKVEPKSCDKTHTCPPCPAPEAAGGPSVFLFPPKPKDTLMISRTPEVTCVVVDVSHEDPEVKFNWYVDGVEVHNAKTKPREEQYNSTYRVVSVLTVLHQDWLNGKEYKCKVSNKALPAPIEKTISKAKGQPREPQVYTLPPSREEMTKNQVSLTCLVKGFYPSDIAVEWESNGQPENNYKTTPPVLDSDGSFFLYSKLTVDKSRWQQGNVFSCSVMHEALHNHYTQKSLSLSPGEPKSSDKTHTPPPPPRTEVQLVESGGGVVQPGGSLRLSCAASGFTFSNYAMTWVRQAPEKGLEWVSSISGSGVSTYYADSVKGRFTISRDNSKNTLYLQMTRLTAEDTAVYFCAKEGSSETDDHYYNVDVWGQGTTVTVSS

SEQ ID NO: 457 - protein, 589 aa, Artificial Sequence
  PR003338 Chain
QVQLVESGGGVVQPGRSLRLSCAASGFTFRSFGMHWVRQAPGKGLEWVAVISYDASNEYYADSVKGRFIISRDNSKDTLYLQMNSLRAGDTAVYYCAKGGGLRWYFAYWGQGTLVTVSSASTKGPSVFPLAPSSKSTSGGTAALGCLVKDYFPEPVTVSWNSGALTSGVHTFPAVLQSSGLYSLSSVVTVPSSSLGTQTYICNVNHKPSNTKVDKKVEPKSCDKTHTCPPCPAPEAAGGPSVFLFPPKPKDTLMISRTPEVTCVVVDVSHEDPEVKFNWYVDGVEVHNAKTKPREEQYNSTYRVVSVLTVLHQDWLNGKEYKCKVSNKALPAPIEKTISKAKGQPREPQVYTLPPSREEMTKNQVSLTCLVKGFYPSDIAVEWESNGQPENNYKTTPPVLDSDGSFFLYSKLTVDKSRWQQGNVFSCSVMHEALHNHYTQKSLSLSPGEPKSSDKTHTPPPPPRTEVQLLESGGGLVQPGGSLRLSCAASGFTFSNYAMSWFRQPPETGLKWVSSIDASGGDTYYADSVKGRFTISRDNSKNTLYLQMNSLRAEDTAVYYCAKEGSHGTDDSHYDVDVWGQGTTVTVSS

SEQ ID NO: 458 - protein, 713 aa, Artificial Sequence
  PR003487 Chain
QVQLVESGGGVVQPGRSLRLSCAASGFTFRSFGMHWVRQAPGKGLEWVAVISYDASNEYYADSVKGRFIISRDNSKDTLYLQMNSLRAGDTAVYYCAKGGGLRWYFAYWGQGTLVTVSSASTKGPSVFPLAPSSKSTSGGTAALGCLVKDYFPEPVTVSWNSGALTSGVHTFPAVLQSSGLYSLSSVVTVPSSSLGTQTYICNVNHKPSNTKVDKKVEPKSCDKTHTCPPCPAPEAAGGPSVFLFPPKPKDTLMISRTPEVTCVVVDVSHEDPEVKFNWYVDGVEVHNAKTKPREEQYNSTYRVVSVLTVLHQDWLNGKEYKCKVSNKALPAPIEKTISKAKGQPREPQVYTLPPSREEMTKNQVSLTCLVKGFYPSDIAVEWESNGQPENNYKTTPPVLDSDGSFFLYSKLTVDKSRWQQGNVFSCSVMHEALHNHYTQKSLSLSPGEPKSSDKTHTPPPPPRTEVQLVESGGGVVQPGGSLRLSCAASGFTFSNYAMTWVRQAPEKGLEWVSSISGSGVSTYYADSVKGRFTISRDNSKNTLYLQMTRLTAEDTAVYFCAKEGSSETDDHYYNVDVWGQGTTVTVSSEVQLVESGGGVVQPGGSLRLSCAASGFTFSNYAMTWVRQAPEKGLEWVSSISGSGVSTYYADSVKGRFTISRDNSKNTLYLQMTRLTAEDTAVYFCAKEGSSETDDHYYNVDVWGQGTTVTVSS

SEQ ID NO: 459 - protein, 718 aa, Artificial Sequence
  PR003488 Chain
QVQLVESGGGVVQPGRSLRLSCAASGFTFRSFGMHWVRQAPGKGLEWVAVISYDASNEYYADSVKGRFIISRDNSKDTLYLQMNSLRAGDTAVYYCAKGGGLRWYFAYWGQGTLVTVSSASTKGPSVFPLAPSSKSTSGGTAALGCLVKDYFPEPVTVSWNSGALTSGVHTFPAVLQSSGLYSLSSVVTVPSSSLGTQTYICNVNHKPSNTKVDKKVEPKSCDKTHTCPPCPAPEAAGGPSVFLFPPKPKDTLMISRTPEVTCVVVDVSHEDPEVKFNWYVDGVEVHNAKTKPREEQYNSTYRVVSVLTVLHQDWLNGKEYKCKVSNKALPAPIEKTISKAKGQPREPQVYTLPPSREEMTKNQVSLTCLVKGFYPSDIAVEWESNGQPENNYKTTPPVLDSDGSFFLYSKLTVDKSRWQQGNVFSCSVMHEALHNHYTQKSLSLSPGEPKSSDKTHTPPPPPRTEVQLVESGGGVVQPGGSLRLSCAASGFTFSNYAMTWVRQAPEKGLEWVSSISGSGVSTYYADSVKGRFTISRDNSKNTLYLQMTRLTAEDTAVYFCAKEGSSETDDHYYNVDVWGQGTTVTVSSGGGGSEVQLVESGGGVVQPGGSLRLSCAASGFTFSNYAMTWVRQAPEKGLEWVSSISGSGVSTYYADSVKGRFTISRDNSKNTLYLQMTRLTAEDTAVYFCAKEGSSETDDHYYNVDVWGQGTTVTVSS

SEQ ID NO: 460 - protein, 589 aa, Artificial Sequence
  PR003549 Chain
EVQLVESGGGLVQPGGSLRLSCAASGFTFSSYWMSWVRQAPGKGLEWVANIKQEGSEKYYVDSVKGRFTISRDNAKNSLYLQMNSLRAEDTAVYYCARDRAVAGAFDIWGQGTMVTVSSASTKGPSVFPLAPSSKSTSGGTAALGCLVKDYFPEPVTVSWNSGALTSGVHTFPAVLQSSGLYSLSSVVTVPSSSLGTQTYICNVNHKPSNTKVDKKVEPKSCDKTHTCPPCPAPEAAGGPSVFLFPPKPKDTLMISRTPEVTCVVVDVSHEDPEVKFNWYVDGVEVHNAKTKPREEQYNSTYRVVSVLTVLHQDWLNGKEYKCKVSNKALGAPIEKTISKAKGQPREPQVYTLPPSREEMTKNQVSLTCLVKGFYPSDIAVEWESNGQPENNYKTTPPVLDSDGSFFLYSKLTVDKSRWQQGNVFSCSVMHEALHNHYTQKSLSLSPGEPKSSDKTHTPPPPPRTEVQLLESGGGLVQLGGSLRLSCAASGFTFSRYAMTWVRQAPEKGLEWVSSISGSGDDTYYGDSVKGRFTISRDNSQNTVYLQMNSLRAEDTAVYFCAKEKAGTTGDYYYNVDVWGQGTTVTVSS

SEQ ID NO: 461 - protein, 589 aa, Artificial Sequence
  PR003550 Chain
EVQLVESGGGLVQPGGSLRLSCAASGFTFSSYWMSWVRQAPGKGLEWVANIKQEGSEKYYVDSVKGRFTISRDNAKNSLYLQMNSLRAEDTAVYYCARDRAVAGAFDIWGQGTMVTVSSASTKGPSVFPLAPSSKSTSGGTAALGCLVKDYFPEPVTVSWNSGALTSGVHTFPAVLQSSGLYSLSSVVTVPSSSLGTQTYICNVNHKPSNTKVDKKVEPKSCDKTHTCPPCPAPEAAGGPSVFLFPPKPKDTLMISRTPEVTCVVVDVSHEDPEVKFNWYVDGVEVHNAKTKPREEQYNSTYRVVSVLTVLHQDWLNGKEYKCKVSNKALGAPIEKTISKAKGQPREPQVYTLPPSREEMTKNQVSLTCLVKGFYPSDIAVEWESNGQPENNYKTTPPVLDSDGSFFLYSKLTVDKSRWQQGNVFSCSVMHEALHNHYTQKSLSLSPGEPKSSDKTHTPPPPPRTEVQLVESGGGVVQPGGSLRLSCAASGFTFSNYAMTWVRQAPEKGLEWVSSISGSGVSTYYADSVKGRFTISRDNSKNTLYLQMTRLTAEDTAVYFCAKEGSSETDDHYYNVDVWGQGTTVTVSS

SEQ ID NO: 462 - protein, 589 aa, Artificial Sequence
  PR003551 Chain
EVQLVESGGGLVQPGGSLRLSCAASGFTFSSYWMSWVRQAPGKGLEWVANIKQEGSEKYYVDSVKGRFTISRDNAKNSLYLQMNSLRAEDTAVYYCARDRAVAGAFDIWGQGTMVTVSSASTKGPSVFPLAPSSKSTSGGTAALGCLVKDYFPEPVTVSWNSGALTSGVHTFPAVLQSSGLYSLSSVVTVPSSSLGTQTYICNVNHKPSNTKVDKKVEPKSCDKTHTCPPCPAPEAAGGPSVFLFPPKPKDTLMISRTPEVTCVVVDVSHEDPEVKFNWYVDGVEVHNAKTKPREEQYNSTYRVVSVLTVLHQDWLNGKEYKCKVSNKALGAPIEKTISKAKGQPREPQVYTLPPSREEMTKNQVSLTCLVKGFYPSDIAVEWESNGQPENNYKTTPPVLDSDGSFFLYSKLTVDKSRWQQGNVFSCSVMHEALHNHYTQKSLSLSPGEPKSSDKTHTPPPPPRTEVQLLESGGGLVQPGGSLRLSCAASGFIFSNFAMTWVRQPPEKGLKWVSSINGSGFNTYYTDSVKGRFTISRDNSRNTLYLQMNRLTAEDTAVYFCAKEGSSETDDHYYNVDVWGQGTTVTVSS

SEQ ID NO: 463 - protein, 455 aa, Artificial Sequence
  PR003690 Chain
EVQLVESGGGLVQPGGSLKLSCAASGFTFSTYAMNWVRQASGKGLEWVGRIRSKYNNYATYYADSVKDRFTISRDDSKNTAYLQMNSLKTEDTAVYYCTRHGNFGNSYVSWFAYWGQGTLVTVSSASTKGPSVFPLAPSSKSTSGGTAALGCLVKDYFPEPVTVSWNSGALTSGVHTFPAVLQSSGLYSLSSVVTVPSSSLGTQTYICNVNHKPSNTKVDKKVEPKSCDKTHTCPPCPAPEAAGGPSVFLFPPKPKDTLYITREPEVTCVVVDVSHEDPEVKFNWYVDGVEVHNAKTKPREEQYNSTYRVVSVLTVLHQDWLNGKEYKCKVSNKALPAPIEKTISKAKGQPREPQVYTLPPCREEMTKNQVSLWCLVKGFYPSDIAVEWESNGQPENNYKTTPPVLDSDGSFFLYSKLTVDKSRWQQGNVFSCSVMHEALHNHYTQKSLSLSPGK

SEQ ID NO: 464 - protein, 493 aa, Artificial Sequence
  PR003690 Chain
EVQLVETGGGLIQPGGSLRLSCAASGFTVSDNYMTWVRQAPGKGLEWVSVIFSGGNTYYADSVKGRFTISRDNAKNTLYLQMNSLRAEDTALYYCARRNYDDTRGTDVFDIWGQGTMVTVSSGGGGSGGGGSGGGGSEVQLVETGGGLIQPGGSLRLSCAASGFTVSDNYMTWVRQAPGKGLEWVSVIFSGGNTYYADSVKGRFTISRDNAKNTLYLQMNSLRAEDTALYYCARRNYDDTRGTDVFDIWGQGTMVTVSSASEPKSSDKTHTCPPCPAPEAAGGPSVFLFPPKPKDTLYITREPEVTCVVVDVSHEDPEVKFNWYVDGVEVHNAKTKPREEQYNSTYRVVSVLTVLHQDWLNGKEYKCKVSNKALPAPIEKTISKAKGQPREPQVCTLPPSREEMTKNQVSLSCAVKGFYPSDIAVEWESNGQPENNYKTTPPVLDSDGSFFLVSKLTVDKSRWQQGNVFSCSVMHEALHNHYTQKSLSLSPGK

SEQ ID NO: 465 - protein, 356 aa, Artificial Sequence
  PR003867 Chain
EVQLVETGGGLIQPGGSLRLSCAASGFTVSDNYMTWVRQAPGKGLEWVSVIFSGGKTYYADSVKGRFTISRDNAKNTLYLQMNSLRAEDTALYYCARRNYDDTRGTDVFDIWGQGTMVTVSSASEPKSSDKTHTCPPCPAPEAAGGPSVFLFPPKPKDTLMISRTPEVTCVVVDVSHEDPEVKFNWYVDGVEVHNAKTKPREEQYNSTYRVVSVLTVLHQDWLNGKEYKCKVSNKALPAPIEKTISKAKGQPREPQVCTLPPSREEMTKNQVSLSCAVKGFYPSDIAVEWESNGQPENNYKTTPPVLDSDGSFFLVSKLTVDKSRWQQGNVFSCSVMHEALHNHYTQKSLSLSPGK

SEQ ID NO: 466 - protein, 356 aa, Artificial Sequence
  PR003868 Chain
EVQLVETGGGLIQPGGSLRLSCAASGFTVYDNYMTWVRQAPGKGLEWVSVIFSGGKTYVADSVKGRFTISRDNAKNTLYLQMNSLRAEDTALYYCARRNYDQTRGTDVFDIWGQGTMVTVSSASEPKSSDKTHTCPPCPAPEAAGGPSVFLFPPKPKDTLMISRTPEVTCVVVDVSHEDPEVKFNWYVDGVEVHNAKTKPREEQYNSTYRVVSVLTVLHQDWLNGKEYKCKVSNKALPAPIEKTISKAKGQPREPQVCTLPPSREEMTKNQVSLSCAVKGFYPSDIAVEWESNGQPENNYKTTPPVLDSDGSFFLVSKLTVDKSRWQQGNVFSCSVMHEALHNHYTQKSLSLSPGK

SEQ ID NO: 467 - protein, 356 aa, Artificial Sequence
  PR003869 Chain
EVQLVETGGGLIQPGGSLRLSCAASGFTVSDSYMTWVRQAPGKGLEWVSVIFSGGRTYYSDSVKGRFTISRDNAKNTLYLQMNSLRAEDTALYYCARRNYDQTLGTDVFDIWGQGTMVTVSSASEPKSSDKTHTCPPCPAPEAAGGPSVFLFPPKPKDTLMISRTPEVTCVVVDVSHEDPEVKFNWYVDGVEVHNAKTKPREEQYNSTYRVVSVLTVLHQDWLNGKEYKCKVSNKALPAPIEKTISKAKGQPREPQVCTLPPSREEMTKNQVSLSCAVKGFYPSDIAVEWESNGQPENNYKTTPPVLDSDGSFFLVSKLTVDKSRWQQGNVFSCSVMHEALHNHYTQKSLSLSPGK

SEQ ID NO: 468 - protein, 356 aa, Artificial Sequence
  PR003870 Chain
EVQLVETGGGLIQPGGSLRLSCAASGFTVSDAYMTWVRQAPGKGLEWVSVIFSGGNTYVSDSVKGRFTISRDNAKNTLYLQMNSLRAEDTALYYCARRNYDQTIGTDVFDIWGQGTMVTVSSASEPKSSDKTHTCPPCPAPEAAGGPSVFLFPPKPKDTLMISRTPEVTCVVVDVSHEDPEVKFNWYVDGVEVHNAKTKPREEQYNSTYRVVSVLTVLHQDWLNGKEYKCKVSNKALPAPIEKTISKAKGQPREPQVCTLPPSREEMTKNQVSLSCAVKGFYPSDIAVEWESNGQPENNYKTTPPVLDSDGSFFLVSKLTVDKSRWQQGNVFSCSVMHEALHNHYTQKSLSLSPGK

SEQ ID NO: 469 - protein, 356 aa, Artificial Sequence
  PR003871 Chain
EVQLVETGGGLIQPGGSLRLSCAASGFTVSDSYMTWVRQAPGKGLEWVSVIFSGGRTYYSDSVKGRFTISRDNAKNTLYLQMNSLRAEDTALYYCARRNYDDTRGTDVFDIWGQGTMVTVSSASEPKSSDKTHTCPPCPAPEAAGGPSVFLFPPKPKDTLMISRTPEVTCVVVDVSHEDPEVKFNWYVDGVEVHNAKTKPREEQYNSTYRVVSVLTVLHQDWLNGKEYKCKVSNKALPAPIEKTISKAKGQPREPQVCTLPPSREEMTKNQVSLSCAVKGFYPSDIAVEWESNGQPENNYKTTPPVLDSDGSFFLVSKLTVDKSRWQQGNVFSCSVMHEALHNHYTQKSLSLSPGK

SEQ ID NO: 470 - protein, 356 aa, Artificial Sequence
  PR003872 Chain
EVQLVETGGGLIQPGGSLRLSCAASGFTVSDSYMTWVRQAPGKGLEWVSVIFSGGKTYVADSVKGRFTISRDNAKNTLYLQMNSLRAEDTALYYCARRNYDQTRGTDVFDIWGQGTMVTVSSASEPKSSDKTHTCPPCPAPEAAGGPSVFLFPPKPKDTLMISRTPEVTCVVVDVSHEDPEVKFNWYVDGVEVHNAKTKPREEQYNSTYRVVSVLTVLHQDWLNGKEYKCKVSNKALPAPIEKTISKAKGQPREPQVCTLPPSREEMTKNQVSLSCAVKGFYPSDIAVEWESNGQPENNYKTTPPVLDSDGSFFLVSKLTVDKSRWQQGNVFSCSVMHEALHNHYTQKSLSLSPGK

SEQ ID NO: 471 - protein, 356 aa, Artificial Sequence
  PR003873 Chain
EVQLVETGGGLIQPGGSLRLSCAASGFTVSDAYMTWVRQAPGKGLEWVSVIFSGGRTYVADSVKGRFTISRDNAKNTLYLQMNSLRAEDTALYYCARRNYDDTRGTDVFDIWGQGTMVTVSSASEPKSSDKTHTCPPCPAPEAAGGPSVFLFPPKPKDTLMISRTPEVTCVVVDVSHEDPEVKFNWYVDGVEVHNAKTKPREEQYNSTYRVVSVLTVLHQDWLNGKEYKCKVSNKALPAPIEKTISKAKGQPREPQVCTLPPSREEMTKNQVSLSCAVKGFYPSDIAVEWESNGQPENNYKTTPPVLDSDGSFFLVSKLTVDKSRWQQGNVFSCSVMHEALHNHYTQKSLSLSPGK

SEQ ID NO: 472 - protein, 356 aa, Artificial Sequence
  PR003874 Chain
EVQLVETGGGLIQPGGSLRLSCAASGFTVSDSYMTWVRQAPGKGLEWVSVIFSGGRTYYSDSVKGRFTISRDNAKNTLYLQMNSLRAEDTALYYCARRNYDQTRGTDVFDIWGQGTMVTVSSASEPKSSDKTHTCPPCPAPEAAGGPSVFLFPPKPKDTLMISRTPEVTCVVVDVSHEDPEVKFNWYVDGVEVHNAKTKPREEQYNSTYRVVSVLTVLHQDWLNGKEYKCKVSNKALPAPIEKTISKAKGQPREPQVCTLPPSREEMTKNQVSLSCAVKGFYPSDIAVEWESNGQPENNYKTTPPVLDSDGSFFLVSKLTVDKSRWQQGNVFSCSVMHEALHNHYTQKSLSLSPGK

SEQ ID NO: 473 - protein, 356 aa, Artificial Sequence
  PR003875 Chain
EVQLVETGGGLIQPGGSLRLSCAASGFTVSDAYMTWVRQAPGKGLEWVSVIFSGGRTYYADSVKGRFTISRDNAKNTLYLQMNSLRAEDTALYYCARRNYDQTRGTDVFDIWGQGTMVTVSSASEPKSSDKTHTCPPCPAPEAAGGPSVFLFPPKPKDTLMISRTPEVTCVVVDVSHEDPEVKFNWYVDGVEVHNAKTKPREEQYNSTYRVVSVLTVLHQDWLNGKEYKCKVSNKALPAPIEKTISKAKGQPREPQVCTLPPSREEMTKNQVSLSCAVKGFYPSDIAVEWESNGQPENNYKTTPPVLDSDGSFFLVSKLTVDKSRWQQGNVFSCSVMHEALHNHYTQKSLSLSPGK

SEQ ID NO: 474 - protein, 356 aa, Artificial Sequence
  PR003876 Chain
EVQLVETGGGLIQPGGSLRLSCAASGFTVSDSYMTWVRQAPGKGLEWVSVIFSGGKTYYSDSVKGRFTISRDNAKNTLYLQMNSLRAEDTALYYCARRNYDQTIGTDVFDIWGQGTMVTVSSASEPKSSDKTHTCPPCPAPEAAGGPSVFLFPPKPKDTLMISRTPEVTCVVVDVSHEDPEVKFNWYVDGVEVHNAKTKPREEQYNSTYRVVSVLTVLHQDWLNGKEYKCKVSNKALPAPIEKTISKAKGQPREPQVCTLPPSREEMTKNQVSLSCAVKGFYPSDIAVEWESNGQPENNYKTTPPVLDSDGSFFLVSKLTVDKSRWQQGNVFSCSVMHEALHNHYTQKSLSLSPGK

SEQ ID NO: 475 - protein, 356 aa, Artificial Sequence
  PR003877 Chain
EVQLVETGGGLIQPGGSLRLSCAASGFTVSDSYMTWVRQAPGKGLEWVSVIFSGGKTYVADSVKGRFTISRDNAKNTLYLQMNSLRAEDTALYYCARRNYDDTRGTDVFDIWGQGTMVTVSSASEPKSSDKTHTCPPCPAPEAAGGPSVFLFPPKPKDTLMISRTPEVTCVVVDVSHEDPEVKFNWYVDGVEVHNAKTKPREEQYNSTYRVVSVLTVLHQDWLNGKEYKCKVSNKALPAPIEKTISKAKGQPREPQVCTLPPSREEMTKNQVSLSCAVKGFYPSDIAVEWESNGQPENNYKTTPPVLDSDGSFFLVSKLTVDKSRWQQGNVFSCSVMHEALHNHYTQKSLSLSPGK

SEQ ID NO: 476 - protein, 356 aa, Artificial Sequence
  PR003878 Chain
EVQLVETGGGLIQPGGSLRLSCAASGFTVSDSYMTWVRQAPGKGLEWVSVIFSGGKTYYADSVKGRFTISRDNAKNTLYLQMNSLRAEDTALYYCARRNYDDTRGTDVFDIWGQGTMVTVSSASEPKSSDKTHTCPPCPAPEAAGGPSVFLFPPKPKDTLMISRTPEVTCVVVDVSHEDPEVKFNWYVDGVEVHNAKTKPREEQYNSTYRVVSVLTVLHQDWLNGKEYKCKVSNKALPAPIEKTISKAKGQPREPQVCTLPPSREEMTKNQVSLSCAVKGFYPSDIAVEWESNGQPENNYKTTPPVLDSDGSFFLVSKLTVDKSRWQQGNVFSCSVMHEALHNHYTQKSLSLSPGK

SEQ ID NO: 477 - protein, 356 aa, Artificial Sequence
  PR003879 Chain
EVQLVETGGGLIQPGGSLRLSCAASGFTVSDAYMTWVRQAPGKGLEWVSVIFSGGRTYYSDSVKGRFTISRDNAKNTLYLQMNSLRAEDTALYYCARRNYDQTRGTDVFDIWGQGTMVTVSSASEPKSSDKTHTCPPCPAPEAAGGPSVFLFPPKPKDTLMISRTPEVTCVVVDVSHEDPEVKFNWYVDGVEVHNAKTKPREEQYNSTYRVVSVLTVLHQDWLNGKEYKCKVSNKALPAPIEKTISKAKGQPREPQVCTLPPSREEMTKNQVSLSCAVKGFYPSDIAVEWESNGQPENNYKTTPPVLDSDGSFFLVSKLTVDKSRWQQGNVFSCSVMHEALHNHYTQKSLSLSPGK

SEQ ID NO: 478 - protein, 356 aa, Artificial Sequence
  PR003880 Chain
EVQLVETGGGLIQPGGSLRLSCAASGFTVSDAYMTWVRQAPGKGLEWVSVIFSGGNTYVSDSVKGRFTISRDNAKNTLYLQMNSLRAEDTALYYCARRNYDQTRGTDVFDIWGQGTMVTVSSASEPKSSDKTHTCPPCPAPEAAGGPSVFLFPPKPKDTLMISRTPEVTCVVVDVSHEDPEVKFNWYVDGVEVHNAKTKPREEQYNSTYRVVSVLTVLHQDWLNGKEYKCKVSNKALPAPIEKTISKAKGQPREPQVCTLPPSREEMTKNQVSLSCAVKGFYPSDIAVEWESNGQPENNYKTTPPVLDSDGSFFLVSKLTVDKSRWQQGNVFSCSVMHEALHNHYTQKSLSLSPGK

SEQ ID NO: 479 - protein, 356 aa, Artificial Sequence
  PR003881 Chain
EVQLVETGGGLIQPGGSLRLSCAASGFTVSDSYMTWVRQAPGKGLEWVSVIFSGGNTYYADSVKGRFTISRDNAKNTLYLQMNSLRAEDTALYYCARRNYDQTLGTDVFDIWGQGTMVTVSSASEPKSSDKTHTCPPCPAPEAAGGPSVFLFPPKPKDTLMISRTPEVTCVVVDVSHEDPEVKFNWYVDGVEVHNAKTKPREEQYNSTYRVVSVLTVLHQDWLNGKEYKCKVSNKALPAPIEKTISKAKGQPREPQVCTLPPSREEMTKNQVSLSCAVKGFYPSDIAVEWESNGQPENNYKTTPPVLDSDGSFFLVSKLTVDKSRWQQGNVFSCSVMHEALHNHYTQKSLSLSPGK

SEQ ID NO: 480 - protein, 356 aa, Artificial Sequence
  PR003882 Chain
EVQLVETGGGLIQPGGSLRLSCAASGFTVSDSYMTWVRQAPGKGLEWVSVIFSGGKTYYSDSVKGRFTISRDNAKNTLYLQMNSLRAEDTALYYCARRNYDQTLGTDVFDIWGQGTMVTVSSASEPKSSDKTHTCPPCPAPEAAGGPSVFLFPPKPKDTLMISRTPEVTCVVVDVSHEDPEVKFNWYVDGVEVHNAKTKPREEQYNSTYRVVSVLTVLHQDWLNGKEYKCKVSNKALPAPIEKTISKAKGQPREPQVCTLPPSREEMTKNQVSLSCAVKGFYPSDIAVEWESNGQPENNYKTTPPVLDSDGSFFLVSKLTVDKSRWQQGNVFSCSVMHEALHNHYTQKSLSLSPGK

SEQ ID NO: 481 - protein, 446 aa, Artificial Sequence
  PR004160 Chain, PR004161 Chain, PR004181 Chain, PR004182 Chain
QVQLVQSGAEVKKPGSSMRVSCKASEDTFSSYAISWVRQAPGQGLEWMGGTAPIFGTTNYAQKFQGRVTITADKSTSTAYMELSSLRSEDTAVYYCARGGPYFDYWGQGTLVTVSSASTKGPSVFPLAPSSKSTSGGTAALGCLVKDYFPEPVTVSWNSGALTSGVHTFPAVLQSSGLYSLSSVVTVPSSSLGTQTYICNVNHKPSNTKVDKKVEPKSCDKTHTCPPCPAPEAAGGPSVFLFPPKPKDTLMISRTPEVTCVVVDVSHEDPEVKFNWYVDGVEVHNAKTKPREEQYNSTYRVVSVLTVLHQDWLNGKEYKCKVSNKALPAPIEKTISKAKGQPREPQVYTLPPCREEMTKNQVSLWCLVKGFYPSDIAVEWESNGQPENNYKTTPPVLDSDGSFFLYSKLTVDKSRWQQGNVFSCSVMHEALHNHYTQKSLSLSPGK

SEQ ID NO: 482 - protein, 497 aa, Artificial Sequence
  PR004160 Chain
EVQLVESGGGVVQPGGSLRLSCAASGFTFSNYAMTWVRQAPEKGLEWVSSISGSGVSTYYADSVKGRFTISRDNSKNTLYLQMTRLTAEDTAVYFCAKEGSSETDDHYYNVDVWGQGTTVTVSSGGGGSGGGGSGGGGSEVQLVESGGGVVQPGGSLRLSCAASGFTFSNYAMTWVRQAPEKGLEWVSSISGSGVSTYYADSVKGRFTISRDNSKNTLYLQMTRLTAEDTAVYFCAKEGSSETDDHYYNVDVWGQGTTVTVSSASEPKSSDKTHTCPPCPAPEAAGGPSVFLFPPKPKDTLMISRTPEVTCVVVDVSHEDPEVKFNWYVDGVEVHNAKTKPREEQYNSTYRVVSVLTVLHQDWLNGKEYKCKVSNKALPAPIEKTISKAKGQPREPQVCTLPPSREEMTKNQVSLSCAVKGFYPSDIAVEWESNGQPENNYKTTPPVLDSDGSFFLVSKLTVDKSRWQQGNVFSCSVMHEALHNHYTQKSLSLSPGK

SEQ ID NO: 483 - protein, 638 aa, Artificial Sequence
  PR004161 Chain
EVQLVESGGGVVQPGGSLRLSCAASGFTFSNYAMTWVRQAPEKGLEWVSSISGSGVSTYYADSVKGRFTISRDNSKNTLYLQMTRLTAEDTAVYFCAKEGSSETDDHYYNVDVWGQGTTVTVSSGGGGSGGGGSGGGGSEVQLVESGGGVVQPGGSLRLSCAASGFTFSNYAMTWVRQAPEKGLEWVSSISGSGVSTYYADSVKGRFTISRDNSKNTLYLQMTRLTAEDTAVYFCAKEGSSETDDHYYNVDVWGQGTTVTVSSASGGGGSGGGGSGGGGSEVQLVESGGGVVQPGGSLRLSCAASGFTFSNYAMTWVRQAPEKGLEWVSSISGSGVSTYYADSVKGRFTISRDNSKNTLYLQMTRLTAEDTAVYFCAKEGSSETDDHYYNVDVWGQGTTVTVSSASEPKSSDKTHTCPPCPAPEAAGGPSVFLFPPKPKDTLMISRTPEVTCVVVDVSHEDPEVKFNWYVDGVEVHNAKTKPREEQYNSTYRVVSVLTVLHQDWLNGKEYKCKVSNKALPAPIEKTISKAKGQPREPQVCTLPPSREEMTKNQVSLSCAVKGFYPSDIAVEWESNGQPENNYKTTPPVLDSDGSFFLVSKLTVDKSRWQQGNVFSCSVMHEALHNHYTQKSLSLSPGK

SEQ ID NO: 484 - protein, 636 aa, Artificial Sequence
  PR004181 Chain
EVQLLESGGGLVQPGGSLRLSCAASGFTFSNYAMTWVRQPPGKGLEWVSSISGSGGSTYYADSVKGRFTISRDNSKNTLYLQMNSLRAEDTAVYYCAKEGTGTTSDYYYNVDVWGQGTTVTVSSGGGGSGGGGSGGGGSEVQLLESGGGLVQPGGSLRLSCAASGFTFSNYAMTWVRQPPGKGLEWVSSISGSGGSTYYADSVKGRFTISRDNSKNTLYLQMNSLRAEDTAVYYCAKEGTGTTSDYYYNVDVWGQGTTVTVSSGGGGSGGGGSGGGGSEVQLLESGGGLVQPGGSLRLSCAASGFTFSNYAMTWVRQPPGKGLEWVSSISGSGGSTYYADSVKGRFTISRDNSKNTLYLQMNSLRAEDTAVYYCAKEGTGTTSDYYYNVDVWGQGTTVTVSSASEPKSSDKTHTCPPCPAPEAAGGPSVFLFPPKPKDTLMISRTPEVTCVVVDVSHEDPEVKFNWYVDGVEVHNAKTKPREEQYNSTYRVVSVLTVLHQDWLNGKEYKCKVSNKALPAPIEKTISKAKGQPREPQVCTLPPSREEMTKNQVSLSCAVKGFYPSDIAVEWESNGQPENNYKTTPPVLDSDGSFFLVSKLTVDKSRWQQGNVFSCSVMHEALHNHYTQKSLSLSPGK

SEQ ID NO: 485 - protein, 633 aa, Artificial Sequence
  PR004182 Chain
EVQLVESGGGLVQPGGSLRLSCAASGFTFSSYWMHWVRQAPGKGLVWVSRINSDGSSTSYADSVQGRFTISRDNAKNTLYLQMNSLRAEDTAVYYCVRKGSSSYYHYSIEDDWGQGTLVTVSSGGGGSGGGGSGGGGSEVQLVESGGGLVQPGGSLRLSCAASGFTFSSYWMHWVRQAPGKGLVWVSRINSDGSSTSYADSVQGRFTISRDNAKNTLYLQMNSLRAEDTAVYYCVRKGSSSYYHYSIEDDWGQGTLVTVSSGGGGSGGGGSGGGGSEVQLVESGGGLVQPGGSLRLSCAASGFTFSSYWMHWVRQAPGKGLVWVSRINSDGSSTSYADSVQGRFTISRDNAKNTLYLQMNSLRAEDTAVYYCVRKGSSSYYHYSIEDDWGQGTLVTVSSASEPKSSDKTHTCPPCPAPEAAGGPSVFLFPPKPKDTLMISRTPEVTCVVVDVSHEDPEVKFNWYVDGVEVHNAKTKPREEQYNSTYRVVSVLTVLHQDWLNGKEYKCKVSNKALPAPIEKTISKAKGQPREPQVCTLPPSREEMTKNQVSLSCAVKGFYPSDIAVEWESNGQPENNYKTTPPVLDSDGSFFLVSKLTVDKSRWQQGNVFSCSVMHEALHNHYTQKSLSLSPGK

SEQ ID NO: 486 - protein, 585 aa, Artificial Sequence
  PR004270 Chain
DIQMTQSPSTLSASVGDRVTVTCRASQSIYIWLAWYQQKPGKAPNLLIYKASSLETGVPSRFSGSGSGTEFTLTISSLQPDDFATYYCQQYYGSSRTFGQGTKVEIKRTVAAPSVFIFPPSDEQLKSGTASVVCLLNNFYPREAKVQWKVDNALQSGNSQESVTEQDSKDSTYSLSSTLTLSKADYEKHKVYACEVTHQGLSSPVTKSFNRGECEPKSSDKTHTPPPPPEVQLVESGGGVVQPGGSLRLSCAASGFTFSNYAMTWVRQAPEKGLEWVSSISGSGVSTYYADSVKGRFTISRDNSKNTLYLQMTRLTAEDTAVYFCAKEGSSETDDHYYNVDVWGQGTTVTVSSEPKSSDKTHTCPPCPAPEAAGGPSVFLFPPKPKDTLMISRTPEVTCVVVDVSHEDPEVKFNWYVDGVEVHNAKTKPREEQYNSTYRVVSVLTVLHQDWLNGKEYKCKVSNKALPAPIEKTISKAKGQPREPQVYTLPPSREEMTKNQVSLTCLVKGFYPSDIAVEWESNGQPENNYKTTPPVLDSDGSFFLYSKLTVDKSRWQQGNVFSCSVMHEALHNHYTQKSLSLSPGK

SEQ ID NO: 487 - protein, 222 aa, Artificial Sequence
  PR004279 Chain, PR005189 Chain
QVQLVESGGGVVQPGRSLRLSCAASGFTFRSFGMHWVRQAPGKGLEWVAVISYDASNEYYADSVKGRFIISRDNSKDTLYLQMNSLRAGDTAVYYCAKGGGLRWYFAYWGQGTLVTVSSASTKGPSVFPLAPSSKSTSGGTAALGCLVKDYFPEPVTVSWNSGALTSGVHTFPAVLQSSGLYSLSSVVTVPSSSLGTQTYICNVNHKPSNTKVDKKVEPKSC

SEQ ID NO: 488 - protein, 586 aa, Artificial Sequence
  PR004279 Chain
EIVMTQSPATLSVSPGERATLSCRASQSISSNLGWYQQKPGQAPRLLIYGASTRATGIPARFSGSGSGTEFTLTISSLQSEDFAVYYCQQYQSWPPLTFGGGTKVEIKRTVAAPSVFIFPPSDEQLKSGTASVVCLLNNFYPREAKVQWKVDNALQSGNSQESVTEQDSKDSTYSLSSTLTLSKADYEKHKVYACEVTHQGLSSPVTKSFNRGECEPKSSDKTHTPPPPPEVQLVESGGGVVQPGGSLRLSCAASGFTFSNYAMTWVRQAPEKGLEWVSSISGSGVSTYYADSVKGRFTISRDNSKNTLYLQMTRLTAEDTAVYFCAKEGSSETDDHYYNVDVWGQGTTVTVSSEPKSSDKTHTCPPCPAPEAAGGPSVFLFPPKPKDTLMISRTPEVTCVVVDVSHEDPEVKFNWYVDGVEVHNAKTKPREEQYNSTYRVVSVLTVLHQDWLNGKEYKCKVSNKALPAPIEKTISKAKGQPREPQVYTLPPSREEMTKNQVSLTCLVKGFYPSDIAVEWESNGQPENNYKTTPPVLDSDGSFFLYSKLTVDKSRWQQGNVFSCSVMHEALHNHYTQKSLSLSPGK

SEQ ID NO: 489 - protein, 483 aa, Artificial Sequence
  PR000510 SCFV
QAVVTQEPSLTVSPGGTVTLTCRSSTGAVTTSNYANWVQQKPGQAPRGLIGGTNKRAPWTPARFSGSLLGDKAALTLLGAQPEDEAEYFCALWYSNLWVFGGGTKLTVLGGGQSGQGGSGGGGSEVQLVESGGGLVQPGGSLKLSCAASGFTFNTYAMNWVRQASGKGLEWVGRIRSKYNNYATYYADSVKDRFTISRDDSKSTLYLQMNSLKTEDTAVYYCVRHGNFGNSYVSWFAYWGQGTLVTVSSASEPKSCDKTHTCPPCPAPEAAGGPSVFLFPPKPKDTLMISRTPEVTCVVVDVSHEDPEVKFNWYVDGVEVHNAKTKPREEQYNSTYRVVSVLTVLHQDWLNGKEYKCKVSNKALPAPIEKTISKAKGQPREPQVYTLPPSREEMTKNQVSLTCLVKGFYPSDIAVEWESNGQPENNYKTTPPVLDSDGSFFLYSKLTVDKSRWQQGNVFSCSVMHEALHNHYTQKSLSLSPGK

SEQ ID NO: 490 - protein, 477 aa, Artificial Sequence
  PR002161 SCFV
QVQLVQSGGGVVQPGRSLRLSCAASGFTFSSYGMHWVRQAPGKGLEWVAVIYYDGRNKYYADSVKGRFTISRDNSKNMLYLQMNGLRAEDTAVYYCARGPGYNWLDPWGQGTLVTVSSGGGGSGGGGSGGGGSEIVLTQSPATLSVSPGERATLSCRASQSVSSNLAWYQQKPGQAPRLLIYGASTRATGIPARFSGSGSGTEFTLTISSLQSEDVATYYCQKYNSAPLTFGGGTKLEIKGGGASEPKSCDKTHTCPPCPAPELLGGPSVFLFPPKPKDTLMISRTPEVTCVVVDVSHEDPEVKFNWYVDGVEVHNAKTKPREEQYNSTYRVVSVLTVLHQDWLNGKEYKCKVSNKALPAPIEKTISKAKGQPREPQVYTLPPSREEMTKNQVSLTCLVKGFYPSDIAVEWESNGQPENNYKTTPPVLDSDGSFFLYSKLTVDKSRWQQGNVFSCSVMHEALHNHYTQKSLSLSPGK

SEQ ID NO: 491 - protein, 477 aa, Artificial Sequence
  PR002163 SCFV
QVQLVQSGGGVVQPGRSLRLSCAASGFTFRSYGMHWVRQAPGKGLEWVAIIYYDGSNKYYADSVKGRFTISRDNSKNTLYLQMNSLRAEDTAVYYCARGLGYNWFDPWGQGTLVTVSSGGGGSGGGGSGGGGSDIQLTQSPSSLSASVGDRVTITCRASQSISSYLNWYQQKPGKAPKLLIYAASSLQSGVPSRFSGSGSGTDFTLTISSLQPEDFATYYCQQSYRTPLTFGGGTKVEIKGGGASEPKSCDKTHTCPPCPAPELLGGPSVFLFPPKPKDTLMISRTPEVTCVVVDVSHEDPEVKFNWYVDGVEVHNAKTKPREEQYNSTYRVVSVLTVLHQDWLNGKEYKCKVSNKALPAPIEKTISKAKGQPREPQVYTLPPSREEMTKNQVSLTCLVKGFYPSDIAVEWESNGQPENNYKTTPPVLDSDGSFFLYSKLTVDKSRWQQGNVFSCSVMHEALHNHYTQKSLSLSPGK

SEQ ID NO: 492 - protein, 477 aa, Artificial Sequence
  PR002337 SCFV
QVQLVESGGGVVQPGRSLRLSCAASGFTFRSYGMHWVRQAPGKGLEWVGMIYYNGKNKYYADSVKGRFTISRDNSRNTLYLQMNGLRAEDTAVYYCARGPGYNWLDPWGQGTLVTVSSGGGGSGGGGSGGGGSEIVLTQSPATLSVSPGERATLSCRASQSVSSNLAWYQQKPGQAPRLLIYGASTRATGIPARFSGSGSGTEFTLTISSLQSEDFAVYYCQQYNNWPLTFGGGTKVEIKGGGASEPKSCDKTHTCPPCPAPELLGGPSVFLFPPKPKDTLMISRTPEVTCVVVDVSHEDPEVKFNWYVDGVEVHNAKTKPREEQYNSTYRVVSVLTVLHQDWLNGKEYKCKVSNKALPAPIEKTISKAKGQPREPQVYTLPPSREEMTKNQVSLTCLVKGFYPSDIAVEWESNGQPENNYKTTPPVLDSDGSFFLYSKLTVDKSRWQQGNVFSCSVMHEALHNHYTQKSLSLSPGK

SEQ ID NO: 493 - protein, 477 aa, Artificial Sequence
  PR002340 SCFV
QVQLVQSGGGVVQPGRSLRLSCAASGFTFRSYGMHWVRQAPGKGLEWVAIIYYDGSNKYYADSVKGRFTISRDNSKNTLYLQMNSLRAEDTAVYYCARGLGYNWFDPWGQGTLVTVSSGGGGSGGGGSGGGGSDIVMTQSPSSLSASVGDRVTITCRASQGISNYLAWYQQKPGKVPKLLIYAASTLQSGVPSRFSGSGSGTDFTLTISSLQPEDVATYYCQKYNSAPYTFGQGTKVEIKGGGASEPKSCDKTHTCPPCPAPELLGGPSVFLFPPKPKDTLMISRTPEVTCVVVDVSHEDPEVKFNWYVDGVEVHNAKTKPREEQYNSTYRVVSVLTVLHQDWLNGKEYKCKVSNKALPAPIEKTISKAKGQPREPQVYTLPPSREEMTKNQVSLTCLVKGFYPSDIAVEWESNGQPENNYKTTPPVLDSDGSFFLYSKLTVDKSRWQQGNVFSCSVMHEALHNHYTQKSLSLSPGK

SEQ ID NO: 494 - protein, 469 aa, Artificial Sequence
  PR001289 Chain
EVQLLESGGGEVQPGGSLRLSCAASGGIFAIKPISWYRQAPGKQREWVSTTTSSGATNYAESVKGRFTISRDNAKNTLYLQMSSLRAEDTAVYYCNVFEYWGQGTLVTVKPGGSGGSEVQLLESGGGEVQPGGSLRLSCAASGFSFSINAMGWYRQAPGKRREFVAAIESGRNTVYAESVKGRFTISRDNAKNTVYLQMSSLRAEDTAVYYCGLLKGNRVVSPSVAYWGQGTLVTVKPGGGGDKTHTCPPCPAPEAAGGPSVFLFPPKPKDTLMISRTPEVTCVVVDVSHEDPEVKFNWYVDGVEVHNAKTKPREEQYNSTYRVVSVLTVLHQDWLNGKEYKCKVSNKALPAPIEKTISKAKGQPREPQVYTLPPSREEMTKNQVSLTCLVKGFYPSDIAVEWESNGQPENNYKTTPPVLDSDGSFFLYSKLTVDKSRWQQGNVFSCSVMHEALHNHYTQKSLSLSPGK

SEQ ID NO: 495 - protein, 4 aa, Artificial Sequence
  GS_4
GSGS

SEQ ID NO: 496 - protein, 5 aa, Artificial Sequence
  GS_5
GGGGS

SEQ ID NO: 497 - protein, 6 aa, Artificial Sequence
  GS_6
GGSGGS

SEQ ID NO: 498 - protein, 7 aa, Artificial Sequence
  GS_7
GGGGSGS

SEQ ID NO: 499 - protein, 15 aa, Artificial Sequence
  GS_15
GGGGSGGGGSGGGGS

SEQ ID NO: 500 - protein, 20 aa, Artificial Sequence
  GS_20
GGGGSGGGGSGGGGSGGGGS

SEQ ID NO: 501 - protein, 25 aa, Artificial Sequence
  GS_25
GGGGSGGGGSGGGGSGGGGSGGGGS

SEQ ID NO: 502 - protein, 15 aa, Artificial Sequence
  H1_15
EPKSSDKTHTPPPPP

SEQ ID NO: 503 - protein, 6 aa, Artificial Sequence
  UH1
EPKSSD

SEQ ID NO: 504 - protein, 10 aa, Artificial Sequence
  LH1
DKTHTCPPCP

SEQ ID NO: 505 - protein, 15 aa, Artificial Sequence
  G5-LH
GGGGGDKTHTCPPCP

SEQ ID NO: 506 - protein, 17 aa, Artificial Sequence
  H1_15-RT
EPKSSDKTHTPPPPPRT

SEQ ID NO: 507 - protein, 17 aa, Artificial Sequence
  AS-GS_15
ASGGGGSGGGGSGGGGS

SEQ ID NO: 508 - protein, 18 aa, Artificial Sequence
  L-GS_15-RT
LGGGGSGGGGSGGGGSRT

SEQ ID NO: 509 - protein, 18 aa, Artificial Sequence
  L-H1_15-RT
LEPKSSDKTHTPPPPPRT

SEQ ID NO: 510 - protein, 19 aa, Artificial Sequence
  KL-H1_15-RT
KLEPKSSDKTHTPPPPPRT

SEQ ID NO: 511 - protein, 19 aa, Artificial Sequence
  KL-H1_15-AS
KLEPKSSDKTHTPPPPPAS

SEQ ID NO: 512 - protein, 9 aa, Artificial Sequence
  RT-GS_5-KL
RTGGGGSKL

SEQ ID NO: 513 - protein, 19 aa, Artificial Sequence
  RT-GS_15-KL
RTGGGGSGGGGSGGGGSKL

SEQ ID NO: 514 - protein, 29 aa, Artificial Sequence
  RT-GS_25-KL
RTGGGGSGGGGSGGGGSGGGGSGGGGSKL

SEQ ID NO: 515 - protein, 15 aa, Artificial Sequence
  human IgG1 hinge
EPKSCDKTHTCPPCP

SEQ ID NO: 516 - protein, 15 aa, Artificial Sequence
  human IgG1 hinge (C220S)
EPKSSDKTHTCPPCP

SEQ ID NO: 517 - protein, 12 aa, Artificial Sequence
  human IgG2 hinge
ERKCCVECPPCP

SEQ ID NO: 518 - protein, 12 aa, Artificial Sequence
  human IgG4 hinge
ESKYGPPCPSCP

SEQ ID NO: 519 - protein, 12 aa, Artificial Sequence
  human IgG4 hinge (S228P)
ESKYGPPCPPCP

SEQ ID NO: 520 - protein, 571 aa, Artificial Sequence
  PR005189 Chain
EIVMTQSPATLSVSPGERATLSCRASQSISSNLGWYQQKPGQAPRLLIYGASTRATGIPARFSGSGSGTEFTLTISSLQSEDFAVYYCQQYQSWPPLTFGGGTKVEIKRTVAAPSVFIFPPSDEQLKSGTASVVCLLNNFYPREAKVQWKVDNALQSGNSQESVTEQDSKDSTYSLSSTLTLSKADYEKHKVYACEVTHQGLSSPVTKSFNRGECEVQLVESGGGVVQPGGSLRLSCAASGFTFSNYAMTWVRQAPEKGLEWVSSISGSGVSTYYADSVKGRFTISRDNSKNTLYLQMTRLTAEDTAVYFCAKEGSSETDDHYYNVDVWGQGTTVTVSSEPKSSDKTHTCPPCPAPEAAGGPSVFLFPPKPKDTLMISRTPEVTCVVVDVSHEDPEVKFNWYVDGVEVHNAKTKPREEQYNSTYRVVSVLTVLHQDWLNGKEYKCKVSNKALPAPIEKTISKAKGQPREPQVYTLPPSREEMTKNQVSLTCLVKGFYPSDIAVEWESNGQPENNYKTTPPVLDSDGSFFLYSKLTVDKSRWQQGNVFSCSVMHEALHNHYTQKSLSLSPGK

SEQ ID NO: 521 - protein, 578 aa, Artificial Sequence
  PR007163 Chain
EVQLVESGGGLVQPGGSLRLSCAASGFTFSSYWMSWVRQAPGKGLEWVANIKQEGSEKYYVDSVKGRFTISRDNAKNSLYLQMNSLRAEDTAVYYCARDRAVAGAFDIWGQGTMVTVSSASTKGPSVFPLAPSSKSTSGGTAALGCLVKDYFPEPVTVSWNSGALTSGVHTFPAVLQSSGLYSLSSVVTVPSSSLGTQTYICNVNHKPSNTKVDKKVEPKSCEVQLVESGGGVVQPGGSLRLSCAASGFTFSNYAMTWVRQAPEKGLEWVSSISGSGVSTYYADSVKGRFTISRDNSKNTLYLQMTRLTAEDTAVYFCAKEGSSETDDHYYNVDVWGQGTTVTVSSEPKSSDKTHTCPPCPAPEAAGGPSVFLFPPKPKDTLMISRTPEVTCVVVDVSHEDPEVKFNWYVDGVEVHNAKTKPREEQYNSTYRVVSVLTVLHQDWLNGKEYKCKVSNKALPAPIEKTISKAKGQPREPQVYTLPPSREEMTKNQVSLTCLVKGFYPSDIAVEWESNGQPENNYKTTPPVLDSDGSFFLYSKLTVDKSRWQQGNVFSCSVMHEALHNHYTQKSLSLSPGK

SEQ ID NO: 522 - protein, 570 aa, Artificial Sequence
  PR007164 Chain
DIQMTQSPSTLSASVGDRVTVTCRASQSIYIWLAWYQQKPGKAPNLLIYKASSLETGVPSRFSGSGSGTEFTLTISSLQPDDFATYYCQQYYGSSRTFGQGTKVEIKRTVAAPSVFIFPPSDEQLKSGTASVVCLLNNFYPREAKVQWKVDNALQSGNSQESVTEQDSKDSTYSLSSTLTLSKADYEKHKVYACEVTHQGLSSPVTKSFNRGECEVQLVESGGGVVQPGGSLRLSCAASGFTFSNYAMTWVRQAPEKGLEWVSSISGSGVSTYYADSVKGRFTISRDNSKNTLYLQMTRLTAEDTAVYFCAKEGSSETDDHYYNVDVWGQGTTVTVSSEPKSSDKTHTCPPCPAPEAAGGPSVFLFPPKPKDTLMISRTPEVTCVVVDVSHEDPEVKFNWYVDGVEVHNAKTKPREEQYNSTYRVVSVLTVLHQDWLNGKEYKCKVSNKALPAPIEKTISKAKGQPREPQVYTLPPSREEMTKNQVSLTCLVKGFYPSDIAVEWESNGQPENNYKTTPPVLDSDGSFFLYSKLTVDKSRWQQGNVFSCSVMHEALHNHYTQKSLSLSPGK

SEQ ID NO: 523 - protein, 578 aa, Artificial Sequence
  PR007165 Chain
QVQLVESGGGVVQPGRSLRLSCAASGFTFRSFGMHWVRQAPGKGLEWVAVISYDASNEYYADSVKGRFIISRDNSKDTLYLQMNSLRAGDTAVYYCAKGGGLRWYFAYWGQGTLVTVSSASTKGPSVFPLAPSSKSTSGGTAALGCLVKDYFPEPVTVSWNSGALTSGVHTFPAVLQSSGLYSLSSVVTVPSSSLGTQTYICNVNHKPSNTKVDKKVEPKSCEVQLVESGGGVVQPGGSLRLSCAASGFTFSNYAMTWVRQAPEKGLEWVSSISGSGVSTYYADSVKGRFTISRDNSKNTLYLQMTRLTAEDTAVYFCAKEGSSETDDHYYNVDVWGQGTTVTVSSEPKSSDKTHTCPPCPAPEAAGGPSVFLFPPKPKDTLMISRTPEVTCVVVDVSHEDPEVKFNWYVDGVEVHNAKTKPREEQYNSTYRVVSVLTVLHQDWLNGKEYKCKVSNKALPAPIEKTISKAKGQPREPQVYTLPPSREEMTKNQVSLTCLVKGFYPSDIAVEWESNGQPENNYKTTPPVLDSDGSFFLYSKLTVDKSRWQQGNVFSCSVMHEALHNHYTQKSLSLSPGK

1-19. (canceled)

20. A binding protein comprising at least two protein functional regions, wherein the binding protein comprises a protein functional region A and a protein functional region B, wherein the protein functional region A and the protein functional region B target different antigens or antigenic epitopes, the protein functional region A is of a Fab or scFv structure, the protein functional region B is of a VH structure, and the number of each of the protein functional region A and the protein functional region B is one or more, wherein:
(A) the binding protein has three polypeptide chains, including one polypeptide chain 1, one polypeptide chain 2 and one polypeptide chain 3, wherein (14) the polypeptide chain 1 comprises VL_A-CL sequentially from the N-terminus to the C-terminus, the polypeptide chain 2 comprises VH_A-CH1-h-CH2-CH3 sequentially from the N-terminus to the C-terminus, and the polypeptide chain 3 comprises VH_B-L-VH_B-h-CH2-CH3 sequentially from the N-terminus to the C-terminus; or (11) the polypeptide chain 1 comprises VL_A-CL sequentially from the N-terminus to the C-terminus, the polypeptide chain 2 comprises VH_A-CH1-h-CH2-CH3 sequentially from the N-terminus to the C-terminus, and the polypeptide chain 3 comprises VH_B-h-CH2-CH3 sequentially from the N-terminus to the C-terminus; or (12) the polypeptide chain 1 comprises VH_A-CL sequentially from the N-terminus to the C-terminus, the polypeptide chain 2 comprises VL_A-CH1-h-CH2-CH3 sequentially from the N-terminus to the C-terminus, and the polypeptide chain 3 comprises VH_B-h-CH2-CH3 sequentially from the N-terminus to the C-terminus; or (13) the polypeptide chain 1 comprises VH_A-CH1 sequentially from the N-terminus to the C-terminus, the polypeptide chain 2 comprises VL_A-CL-h-CH2-CH3 sequentially from the N-terminus to the C-terminus, and the polypeptide chain 3 comprises VH_B-h-CH2-CH3 sequentially from the N-terminus to the C-terminus; or (15) the polypeptide chain 1 comprises VL_A-CL sequentially from the N-terminus to the C-terminus, the polypeptide chain 2 comprises VH_A-CH1-h-CH2-CH3 sequentially from the N-terminus to the C-terminus, and the polypeptide chain 3 comprises VH_C-L-VH_B-h-CH2-CH3 sequentially from the N-terminus to the C-terminus; or (16) the polypeptide chain 1 comprises VH_A-CL sequentially from the N-terminus to the C-terminus, the polypeptide chain 2 comprises VL_A-CH1-h-CH2-CH3 sequentially from the N-terminus to the C-terminus, and the polypeptide chain 3 comprises VH_B-L-VH_B-h-CH2-CH3 sequentially from the N-terminus to the C-terminus; or (17) the polypeptide chain 1 comprises VH_A-CL sequentially from the N-terminus to the C-terminus, the polypeptide chain 2 comprises VL_A-CH1-h-CH2-CH3 sequentially from the N-terminus to the C-terminus, and the polypeptide chain 3 comprises VH_C-L-VH_B-h-CH2-CH3 sequentially from the N-terminus to the C-terminus; or (18) the polypeptide chain 1 comprises VH_A-CH1 sequentially from the N-terminus to the C-terminus, the polypeptide chain 2 comprises VL_A-CL-h-CH2-CH3 sequentially from the N-terminus to the C-terminus, and the polypeptide chain 3 comprises VH_B-L-VH_B-h-CH2-CH3 sequentially from the N-terminus to the C-terminus; or (19) the polypeptide chain 1 comprises VH_A-CH1 sequentially from the N-terminus to the C-terminus, the polypeptide chain 2 comprises VL_A-CL-h-CH2-CH3 sequentially from the N-terminus to the C-terminus, and the polypeptide chain 3 comprises VH_C-L-VH_B-h-CH2-CH3 sequentially from the N-terminus to the C-terminus; or (26) the polypeptide chain 1 comprises VL_A-CL sequentially from the N-terminus to the C-terminus, the polypeptide chain 2 comprises VH_A-CH1-h-CH2-CH3 sequentially from the N-terminus to the C-terminus, and the polypeptide chain 3 comprises VH_B-L1-VH_B-L2-VH_B-h-CH2-CH3 sequentially from the N-terminus to the C-terminus; or (27) the polypeptide chain 1 comprises VL_A-CL sequentially from the N-terminus to the C-terminus, the polypeptide chain 2 comprises VH_A-CH1-h-CH2-CH3 sequentially from the N-terminus to the C-terminus, and the polypeptide chain 3 comprises VH_D-L1-VH_C-L2-VH_B-h-CH2-CH3 sequentially from the N-terminus to the C-terminus; wherein the L, L1 and L2 are linker peptides, and the h is a hinge region or linker peptide such as “-”, GS or an amino acid sequence as set forth in any one of SEQ ID NOs: 495-519,
(B) the binding protein has two polypeptide chains, including one polypeptide chain 1 and one polypeptide chain 2, wherein (23) the polypeptide chain 1 comprises VH_A-L1-VL_A-h-CH2-CH3 sequentially from the N-terminus to the C-terminus, and the polypeptide chain 2 comprises VH_B-L2-VH_B-h-CH2-CH3 sequentially from the N-terminus to the C-terminus; or (20) the polypeptide chain 1 comprises VL_A-L-VH_A-h-CH2-CH3 sequentially from the N-terminus to the C-terminus, and the polypeptide chain 2 comprises VH_B-h-CH2-CH3 sequentially from the N-terminus to the C-terminus; or (21) the polypeptide chain 1 comprises VH_A-L-VL_A-h-CH2-CH3 sequentially from the N-terminus to the C-terminus, and the polypeptide chain 2 comprises VH_B-h-CH2-CH3 sequentially from the N-terminus to the C-terminus; or (22) the polypeptide chain 1 comprises VL_A-L1-VH_A-h-CH2-CH3 sequentially from the N-terminus to the C-terminus, and the polypeptide chain 2 comprises VH_B-L2-VH_B-h-CH2-CH3 sequentially from the N-terminus to the C-terminus; or (24) the polypeptide chain 1 comprises VL_A-L1-VH_A-h-CH2-CH3 sequentially from the N-terminus to the C-terminus, and the polypeptide chain 2 comprises VH_C-L2-VH_B-CH2-CH3 sequentially from the N-terminus to the C-terminus; or (25) the polypeptide chain 1 comprises VH_A-L1-VL_A-h-CH2-CH3 sequentially from the N-terminus to the C-terminus, and the polypeptide chain 2 comprises VH_C-L2-VH_B-h-CH2-CH3 sequentially from the N-terminus to the C-terminus; wherein the L, L1 and L2 are linker peptides, and the h is a hinge region or linker peptide such as “-”, GS or an amino acid sequence as set forth in any one of SEQ ID NOs: 495-519; or,
(C) the binding protein has four polypeptide chains, including two identical short chains and two identical long chains, wherein (1) the short chain comprises VH_A-CH1 sequentially from the N terminus to the C terminus, and the long chain comprises VL_A-CL-L1-VH_B-L2-CH2-CH3 sequentially from the N terminus to the C terminus; or (2) the short chain comprises VL_A-CL sequentially from the N terminus to the C terminus, and the long chain comprises VH_A-CH1-L1-VH_B-L2-CH2-CH3 sequentially from the N terminus to the C terminus; or (3) the short chain comprises VL_A-CL sequentially from the N terminus to the C terminus, and the long chain comprises VH_B-L-VH_A-CH1-h-CH2-CH3 sequentially from the N terminus to the C terminus; or (4) the short chain comprises VH_B-L-VL_A-CL sequentially from the N terminus to the C terminus, and the long chain comprises VH_A-CH1-h-CH2-CH3 sequentially from the N terminus to the C terminus; or (5) the short chain comprises VL_A-CL sequentially from the N terminus to the C terminus, and the long chain comprises VH_A-CH1-h-CH2-CH3-L-VH_B sequentially from the N terminus to the C terminus; or (6) the short chain comprises VL_A-CL-L-VH_B sequentially from the N terminus to the C terminus, and the long chain comprises VH_A-CH1-h-CH2-CH3 sequentially from the N terminus to the C terminus; or (7) the short chain comprises VL_A-CL sequentially from the N terminus to the C terminus, and the long chain comprises VH_A-CH1-h-CH2-CH3-L1-VH_B-L2-VH_B sequentially from the N terminus to the C terminus; or (8) the short chain comprises VL_A-CL sequentially from the N terminus to the C terminus, and the long chain comprises VH_A-CH1-h-CH2-CH3-L1-VH_B-L2-VH_C sequentially from the N terminus to the C terminus; or (9) the short chain comprises VH_B-L1-VL_A-CL sequentially from the N terminus to the C terminus, and the long chain comprises VH_B-L2-VH_A-CH1-h-CH2-CH3 sequentially from the N terminus to the C terminus; or (10) the short chain comprises VH_B-L1-VL_A-CL sequentially from the N terminus to the C terminus, and the long chain comprises VH_C-L2-VH_A-CH1-h-CH2-CH3 sequentially from the N terminus to the C terminus; wherein the L, L1 and L2 are linker peptides, and the h is a hinge region or linker peptide, such as “-”, GS or an amino acid sequence as set forth in any one of SEQ ID NOs: 495-519.

21. The binding protein according to claim 20, wherein the protein functional region A or the protein functional region B is selected from one of a CD3 antibody, a BCMA antibody, a PD-L1 antibody, an HER2 antibody, a B7H4 antibody, a CTLA4 antibody and a 4-1BB antibody.

22. The binding protein according to claim 20, wherein the protein functional region A is a CD3 antibody, a PD-L1 antibody, an HER2 antibody or a B7H4 antibody, and the protein functional region B is a BCMA antibody, a CTLA4 antibody or a 4-1BB antibody.

23. The binding protein according to claim 20, wherein the protein functional region A is a CD3 antibody, and the protein functional region B is a BCMA antibody; or, the protein functional region A is a PD-L1 antibody, and the protein functional region B is a CTLA4 antibody; or, the protein functional region A is a PD-L1 antibody, and the protein functional region B is a 4-1BB antibody; or, the protein functional region A is an HER2 antibody, and the protein functional region B is a CTLA4 antibody; or, the protein functional region A is a B7H4 antibody, and the protein functional region B is a 4-1BB antibody.

24. The binding protein according to claim 20, wherein
the CD3 antibody comprises a light chain variable region and a heavy chain variable region, wherein the light chain variable region VL comprises LCDR1, LCDR2 and LCDR3 with amino acid sequences as set forth in SEQ ID NOs: 172, 192 and 216, respectively; and the heavy chain variable region VH comprises HCDR1, HCDR2 and HCDR3 with amino acid sequences as set forth in SEQ ID NOs: 30, 68 and 128, respectively; or the light chain variable region VL comprises LCDR1, LCDR2 and LCDR3 with amino acid sequences as set forth in SEQ ID NOs: 172, 192 and 216, respectively; and the heavy chain variable region VH comprises HCDR1, HCDR2 and HCDR3 with amino acid sequences as set forth in SEQ ID NOs: 20, 68 and 128, respectively; or, the light chain variable region VL comprises an amino acid sequence as set forth in SEQ ID NO: 291; and the heavy chain variable region VH comprises an amino acid sequence as set forth in SEQ ID NO: 263; or the light chain variable region VL comprises an amino acid sequence as set forth in SEQ ID NO: 291; and the heavy chain variable region VH comprises an amino acid sequence as set forth in SEQ ID NO: 245, respectively; or, the light chain variable region VL comprises an amino acid sequence as set forth in SEQ ID NO: 291; and the heavy chain variable region VH comprises an amino acid sequence as set forth in SEQ ID NO: 257; or, the light chain variable region VL comprises an amino acid sequence as set forth in SEQ ID NO: 291; and the heavy chain variable region VH comprises an amino acid sequence as set forth in SEQ ID NO: 281; or, the light chain variable region VL comprises an amino acid sequence as set forth in SEQ ID NO: 291; and the heavy chain variable region VH comprises an amino acid sequence as set forth in SEQ ID NO: 244; or,
the CD3 antibody comprises a light chain variable region and a heavy chain variable region, wherein the light chain variable region VL comprises LCDR1, LCDR2 and LCDR3 with amino acid sequences as set forth in SEQ ID NOs: 177, 191 and 221, respectively; and the heavy chain variable region VH comprises HCDR1, HCDR2 and HCDR3 with amino acid sequences as set forth in SEQ ID NOs: 15, 84 and 141, respectively; or, the light chain variable region VL comprises LCDR1, LCDR2 and LCDR3 with amino acid sequences as set forth in SEQ ID NOs: 178, 197 and 222; and the heavy chain variable region VH comprises HCDR1, HCDR2 and HCDR3 with amino acid sequences as set forth in SEQ ID NOs: 31, 85 and 142, respectively; or, the light chain variable region VL comprises LCDR1, LCDR2 and LCDR3 with amino acid sequences as set forth in SEQ ID NOs: 177, 191 and 223, respectively; and the heavy chain variable region VH comprises HCDR1, HCDR2 and HCDR3 with amino acid sequences as set forth in SEQ ID NOs: 31, 86 and 141, respectively; or, the light chain variable region VL comprises LCDR1, LCDR2 and LCDR3 with amino acid sequences as set forth in SEQ ID NOs: 179, 198 and 224, respectively; and the heavy chain variable region VH comprises HCDR1, HCDR2 and HCDR3 with amino acid sequences as set forth in SEQ ID NOs: 31, 85 and 142, respectively; or, the light chain variable region VL comprises an amino acid sequence as set forth in SEQ ID NO: 294; and the heavy chain variable region VH comprises an amino acid sequence as set forth in SEQ ID NO: 258; or, the light chain variable region VL comprises an amino acid sequence as set forth in SEQ ID NO: 295; and the heavy chain variable region VH comprises an amino acid sequence as set forth in SEQ ID NO: 259; or, the light chain variable region VL comprises an amino acid sequence as set forth in SEQ ID NO: 296; and the heavy chain variable region VH comprises an amino acid sequence as set forth in SEQ ID NO: 260; or, the light chain variable region VL comprises an amino acid sequence as set forth in SEQ ID NO: 297; and the heavy chain variable region VH comprises an amino acid sequence as set forth in SEQ ID NO: 259; and,
the BCMA antibody comprises a heavy chain variable region, wherein the heavy chain variable region VH comprises HCDR1, HCDR2 and HCDR3 with amino acid sequences as set forth in SEQ ID NOs: 26, 78 and 136, respectively; or the heavy chain variable region VH comprises HCDR1, HCDR2 and HCDR3 with amino acid sequences as set forth in SEQ ID NOs: 15, 75 and 133, respectively; or, the heavy chain variable region VH comprises HCDR1, HCDR2 and HCDR3 with amino acid sequences set forth in SEQ ID NOs: 24, 76 and 134, respectively; or, the heavy chain variable region VH comprises HCDR1, HCDR2 and HCDR3 with amino acid sequences set forth in SEQ ID NOs: 25, 77 and 135, respectively; or, the heavy chain variable region VH comprises an amino acid sequence as set forth in SEQ ID NO: 251; or the heavy chain variable region VH comprises an amino acid sequence as set forth in SEQ ID NO: 248; or, the heavy chain variable region VH comprises an amino acid sequence as set forth in SEQ ID NO: 249; or, the heavy chain variable region VH comprises an amino acid sequence as set forth in SEQ ID NO: 250; or,
the BCMA antibody comprises a heavy chain variable region, wherein the heavy chain variable region VH comprises HCDR1, HCDR2 and HCDR3 with amino acid sequences as set forth in SEQ ID NOs: 26, 90 and 136; or, the heavy chain variable region VH comprises HCDR1, HCDR2 and HCDR3 with amino acid sequences as set forth in SEQ ID NOs: 34, 78 and 146, respectively; or, the heavy chain variable region VH comprises HCDR1, HCDR2 and HCDR3 with amino acid sequences as set forth in SEQ ID NOs: 35, 78 and 147; or, the heavy chain variable region VH comprises HCDR1, HCDR2 and HCDR3 with amino acid sequences as set forth in SEQ ID NOs: 35, 90 and 147, respectively; or, the heavy chain variable region VH comprises HCDR1, HCDR2 and HCDR3 with amino acid sequences as set forth in SEQ ID NOs: 36, 90 and 146, respectively; or, the heavy chain variable region VH comprises HCDR1, HCDR2 and HCDR3 with amino acid sequences as set forth in SEQ ID NOs: 35, 76 and 147, respectively; or, the heavy chain variable region VH comprises HCDR1, HCDR2 and HCDR3 with amino acid sequences as set forth in SEQ ID NOs: 34, 78 and 148, respectively; or, the heavy chain variable region VH comprises HCDR1, HCDR2 and HCDR3 with amino acid sequences as set forth in SEQ ID NOs: 35, 76 and 136, respectively; or, the heavy chain variable region VH comprises HCDR1, HCDR2 and HCDR3 with amino acid sequences as set forth in SEQ ID NOs: 35, 90 and 146, respectively; or, the heavy chain variable region VH comprises HCDR1, HCDR2 and HCDR3 with amino acid sequences as set forth in SEQ ID NOs: 34, 76 and 136, respectively; or, the heavy chain variable region VH comprises HCDR1, HCDR2 and HCDR3 with amino acid sequences as set forth in SEQ ID NO 35, 76 and 146, respectively; or, the heavy chain variable region VH comprises HCDR1, HCDR2 and HCDR3 with amino acid sequences as set forth in SEQ ID NOs: 34, 76 and 146, respectively; or, the heavy chain variable region VH comprises HCDR1, HCDR2 and HCDR3 with amino acid sequences as set forth in SEQ ID NOs: 35, 90 and 148, respectively; or, the heavy chain variable region VH comprises HCDR1, HCDR2 and HCDR3 with amino acid sequences as set forth in SEQ ID NOs: 35, 90 and 136, respectively; or, the heavy chain variable region VH comprises an amino acid sequence as set forth in SEQ ID NO: 265; or, the heavy chain variable region VH comprises an amino acid sequence as set forth in SEQ ID NO: 266; or, the heavy chain variable region VH comprises an amino acid sequence as set forth in SEQ ID NO: 267; or, the heavy chain variable region VH comprises an amino acid sequence as set forth in SEQ ID NO: 268; or, the heavy chain variable region VH comprises an amino acid sequence as set forth in SEQ ID NO: 269; or, the heavy chain variable region VH comprises an amino acid sequence as set forth in SEQ ID NO: 270; or, the heavy chain variable region VH comprises an amino acid sequence as set forth in SEQ ID NO: 271; or, the heavy chain variable region VH comprises an amino acid sequence as set forth in SEQ ID NO: 272; or, the heavy chain variable region VH comprises an amino acid sequence as set forth in SEQ ID NO: 273; or, the heavy chain variable region VH comprises an amino acid sequence as set forth in SEQ ID NO: 274; or, the heavy chain variable region VH comprises an amino acid sequence as set forth in SEQ ID NO: 275; or, the heavy chain variable region VH comprises an amino acid sequence as set forth in SEQ ID NO: 276; or, the heavy chain variable region VH comprises an amino acid sequence as set forth in SEQ ID NO: 277; or, the heavy chain variable region VH comprises an amino acid sequence as set forth in SEQ ID NO: 278; or, the heavy chain variable region VH comprises an amino acid sequence as set forth in SEQ ID NO: 279; or, the heavy chain variable region VH comprises an amino acid sequence as set forth in SEQ ID NO: 280; and
the PD-L1 antibody comprises a light chain variable region and a heavy chain variable region, wherein the light chain variable region VL comprises LCDR1, LCDR2 and LCDR3 with amino acid sequences as set forth in SEQ ID NOs: 167, 188 and 211, respectively; and the heavy chain variable region VH comprises HCDR1, HCDR2 and HCDR3 with amino acid sequences as set forth in SEQ ID NOs: 15, 62 and 122, respectively; or, the light chain variable region VL comprises LCDR1, LCDR2 and LCDR3 with amino acid sequences as set forth in SEQ ID NOs: 167, 188 and 211, respectively; and the heavy chain variable region VH comprises HCDR1, HCDR2 and HCDR3 with amino acid sequences as set forth in SEQ ID NOs: 15, 69 and 122, respectively; or, the light chain variable region VL comprises an amino acid sequence as set forth in SEQ ID NO: 282; and the heavy chain variable region VH comprises an amino acid sequence as set forth in SEQ ID NO: 233; or, the light chain variable region VL comprises an amino acid sequence as set forth in SEQ ID NO: 282; and the heavy chain variable region VH comprises an amino acid sequence as set forth in SEQ ID NO: 240; and,
the PD-L1 antibody comprises a light chain variable region and a heavy chain variable region, wherein the light chain variable region VL comprises LCDR1, LCDR2 and LCDR3 with amino acid sequences as set forth in SEQ ID NOs: 169, 190 and 213, respectively; and the heavy chain variable region VH comprises HCDR1, HCDR2 and HCDR3 with amino acid sequences as set forth in SEQ ID NOs: 16, 64 and 124, respectively; or, the light chain variable region VL comprises an amino acid sequence as set forth in SEQ ID NO: 284; and the heavy chain variable region VH comprises an amino acid sequence as set forth in SEQ ID NO: 235; and,
the HER2 antibody comprises a light chain variable region and a heavy chain variable region, wherein the light chain variable region VL comprises LCDR1, LCDR2 and LCDR3 with amino acid sequences as set forth in SEQ ID NO: 171, 190 and 215, respectively; and the heavy chain variable region VH comprises HCDR1, HCDR2 and HCDR3 with amino acid sequences as set forth in SEQ ID NOs: 19, 67 and 127, respectively; or, the light chain variable region VL comprises LCDR1, LCDR2 and LCDR3 with amino acid sequences as set forth in SEQ ID NOs: 176, 196 and 220, respectively; and the heavy chain variable region VH comprises HCDR1, HCDR2 and HCDR3 with amino acid sequences as set forth in SEQ ID NOs: 23, 74 and 132, respectively; or, the light chain variable region VL comprises an amino acid sequence as set forth in SEQ ID NO: 286; and the heavy chain variable region VH comprises an amino acid sequence as set forth in SEQ ID NO: 238; or, the light chain variable region VL comprises an amino acid sequence as set forth in SEQ ID NO: 293; and the heavy chain variable region VH comprises an amino acid sequence as set forth in SEQ ID NO: 247; and,
the B7H4 antibody comprises a light chain variable region and a heavy chain variable region, wherein the light chain variable region VL comprises LCDR1, LCDR2 and LCDR3 with amino acid sequences as set forth in SEQ ID NOs: 180, 191 and 225, respectively; and the heavy chain variable region VH comprises HCDR1, HCDR2 and HCDR3 with amino acid sequences as set forth in SEQ ID NOs: 32, 87 and 143, respectively; or, the light chain variable region VL comprises LCDR1, LCDR2 and LCDR3 with amino acid sequences as set forth in SEQ ID NOs: 177, 191 and 226, respectively; and the heavy chain variable region VH comprises HCDR1, HCDR2 and HCDR3 with amino acid sequences as set forth in SEQ ID NOs: 33, 88 and 144, respectively; or, the light chain variable region VL comprises an amino acid sequence as set forth in SEQ ID NO: 298; and the heavy chain variable region VH comprises an amino acid sequence as set forth in SEQ ID NO: 261; or, the light chain variable region VL comprises an amino acid sequence as set forth in SEQ ID NO: 299; and the heavy chain variable region VH comprises an amino acid sequence as set forth in SEQ ID NO: 262; and,
the CTLA4 antibody comprises a heavy chain variable region, wherein the heavy chain variable region VH comprises HCDR1, HCDR2 and HCDR3 with amino acid sequences as set forth in SEQ ID NOs: 17, 65 and 125, respectively; or, the heavy chain variable region VH comprises an amino acid sequence as set forth in SEQ ID NO: 236; and,
the 4-1BB antibody comprises a light chain variable region and a heavy chain variable region, wherein the light chain variable region VL comprises LCDR1, LCDR2 and LCDR3 with amino acid sequences as set forth in SEQ ID NO: 170, 191 and 214, respectively; and the heavy chain variable region VH comprises HCDR1, HCDR2 and HCDR3 with amino acid sequences as set forth in SEQ ID NOs: 18, 66 and 126, respectively; or, the light chain variable region VL comprises LCDR1, LCDR2 and LCDR3 with amino acid sequences as set forth in SEQ ID NOs: 170, 191 and 214, respectively; and the heavy chain variable region VH comprises HCDR1, HCDR2 and HCDR3 with amino acid sequences as set forth in SEQ ID NOs: 18, 71 and 126, respectively; or, the light chain variable region VL comprises an amino acid sequence as set forth in SEQ ID NO: 285; and the heavy chain variable region VH comprises an amino acid sequence as set forth in SEQ ID NO: 237; or, the light chain variable region VL comprises an amino acid sequence as set forth in SEQ ID NO: 289; and the heavy chain variable region VH comprises an amino acid sequence as set forth in SEQ ID NO: 242; and,
the 4-1BB antibody comprises a heavy chain variable region, wherein the heavy chain variable region VH comprises HCDR1, HCDR2 and HCDR3 with amino acid sequences as set forth in SEQ ID NOs: 27, 79 and 137, respectively; or, the heavy chain variable region VH comprises HCDR1, HCDR2 and HCDR3 with amino acid sequences as set forth in SEQ ID NOs: 28, 80 and 138, respectively; or, the heavy chain variable region VH comprises HCDR1, HCDR2 and HCDR3 with amino acid sequences as set forth in SEQ ID NOs: 29, 82 and 138, respectively; or, the heavy chain variable region VH comprises HCDR1, HCDR2 and HCDR3 with amino acid sequences as set forth in SEQ ID NOs: 28, 89 and 145, respectively; or, the heavy chain variable region VH comprises HCDR1, HCDR2 and HCDR3 with amino acid sequences as set forth in SEQ ID NOs: 28, 81 and 139, respectively; or, the heavy chain variable region VH comprises HCDR1, HCDR2 and HCDR3 with amino acid sequences as set forth in SEQ ID NOs: 15, 83 and 140, respectively; or, the heavy chain variable region VH comprises an amino acid sequence as set forth in SEQ ID NO: 252; or, the heavy chain variable region VH comprises an amino acid sequence as set forth in SEQ ID NO: 253; or, the heavy chain variable region VH comprises an amino acid sequence as set forth in SEQ ID NO: 255; or, the heavy chain variable region VH comprises an amino acid sequence as set forth in SEQ ID NO: 264; or, the heavy chain variable region VH comprises an amino acid sequence as set forth in SEQ ID NO: 254; or, the heavy chain variable region VH comprises an amino acid sequence as set forth in SEQ ID NO: 256.

25. The binding protein according to claim 20,
(A) comprising a protein functional region A and a protein functional region B, wherein:
the protein functional region A comprises a light chain variable region and a heavy chain variable region, wherein the light chain variable region VL comprises LCDR1, LCDR2 and LCDR3 with amino acid sequences as set forth in SEQ ID NOs: 172, 192 and 216, respectively; and the heavy chain variable region VH comprises HCDR1, HCDR2 and HCDR3 with amino acid sequences as set forth in SEQ ID NOs: 30, 68 and 128, respectively; and the protein functional region B comprises a heavy chain variable region, wherein the heavy chain variable region VH comprises HCDR1, HCDR2 and HCDR3 with amino acid sequences as set forth in SEQ ID NOs: 26, 78 and 136, respectively; or,
the protein functional region A comprises a light chain variable region and a heavy chain variable region, wherein the light chain variable region VL comprises LCDR1, LCDR2 and LCDR3 with amino acid sequences as set forth in SEQ ID NOs: 172, 192 and 216, respectively; and the heavy chain variable region VH comprises HCDR1, HCDR2 and HCDR3 with amino acid sequences as set forth in SEQ ID NOs: 20, 68 and 128, respectively; and the protein functional region B comprises a heavy chain variable region, wherein the heavy chain variable region VH comprises HCDR1, HCDR2 and HCDR3 with amino acid sequences as set forth in SEQ ID NOs: 26, 78 and 136, respectively; or,
the protein functional region A comprises a light chain variable region and a heavy chain variable region, wherein the light chain variable region VL comprises LCDR1, LCDR2 and LCDR3 with amino acid sequences as set forth in SEQ ID NOs: 172, 192 and 216, respectively; and the heavy chain variable region VH comprises HCDR1, HCDR2 and HCDR3 with amino acid sequences as set forth in SEQ ID NOs: 30, 68 and 128, respectively; and the protein functional region B comprises a heavy chain variable region, wherein the heavy chain variable region VH comprises HCDR1, HCDR2 and HCDR3 with amino acid sequences as set forth in SEQ ID NOs: 26, 90 and 136, respectively; or,
the protein functional region A comprises a light chain variable region and a heavy chain variable region, wherein the light chain variable region VL comprises LCDR1, LCDR2 and LCDR3 with amino acid sequences as set forth in SEQ ID NOs: 172, 192 and 216, respectively; and the heavy chain variable region VH comprises HCDR1, HCDR2 and HCDR3 with amino acid sequences as set forth in SEQ ID NOs: 30, 68 and 128, respectively; and the protein functional region B comprises a heavy chain variable region, wherein the heavy chain variable region VH comprises HCDR1, HCDR2 and HCDR3 with amino acid sequences as set forth in SEQ ID NOs: 36, 90 and 146, respectively; or,
the protein functional region A comprises a light chain variable region and a heavy chain variable region, wherein the light chain variable region VL comprises LCDR1, LCDR2 and LCDR3 with amino acid sequences as set forth in SEQ ID NOs: 172, 192 and 216, respectively; and the heavy chain variable region VH comprises HCDR1, HCDR2 and HCDR3 with amino acid sequences as set forth in SEQ ID NOs: 30, 68 and 128, respectively; and the protein functional region B comprises a heavy chain variable region, wherein the heavy chain variable region VH comprises HCDR1, HCDR2 and HCDR3 with amino acid sequences as set forth in SEQ ID NOs: 35, 76 and 147, respectively; or,
the protein functional region A comprises a light chain variable region and a heavy chain variable region, wherein the light chain variable region VL comprises LCDR1, LCDR2 and LCDR3 with amino acid sequences as set forth in SEQ ID NOs: 172, 192 and 216, respectively; and the heavy chain variable region VH comprises HCDR1, HCDR2 and HCDR3 with amino acid sequences as set forth in SEQ ID NOs: 30, 68 and 128, respectively; and the protein functional region B comprises a heavy chain variable region, wherein the heavy chain variable region VH comprises HCDR1, HCDR2 and HCDR3 with amino acid sequences as set forth in SEQ ID NOs: 34, 78 and 148, respectively; or,
the protein functional region A comprises a light chain variable region and a heavy chain variable region, wherein the light chain variable region VL comprises LCDR1, LCDR2 and LCDR3 with amino acid sequences as set forth in SEQ ID NOs: 172, 192 and 216, respectively; and the heavy chain variable region VH comprises HCDR1, HCDR2 and HCDR3 with amino acid sequences as set forth in SEQ ID NOs: 30, 68 and 128, respectively; and the protein functional region B comprises a heavy chain variable region, wherein the heavy chain variable region VH comprises HCDR1, HCDR2 and HCDR3 with amino acid sequences as set forth in SEQ ID NOs: 35, 76 and 136, respectively; or,
the protein functional region A comprises a light chain variable region and a heavy chain variable region, wherein the light chain variable region VL comprises LCDR1, LCDR2 and LCDR3 with amino acid sequences as set forth in SEQ ID NOs: 172, 192 and 216, respectively; and the heavy chain variable region VH comprises HCDR1, HCDR2 and HCDR3 with amino acid sequences as set forth in SEQ ID NOs: 30, 68 and 128, respectively; and the protein functional region B comprises a heavy chain variable region, wherein the heavy chain variable region VH comprises HCDR1, HCDR2 and HCDR3 with amino acid sequences as set forth in SEQ ID NOs: 35, 90 and 146, respectively; or,
the protein functional region A comprises a light chain variable region and a heavy chain variable region, wherein the light chain variable region VL comprises LCDR1, LCDR2 and LCDR3 with amino acid sequences as set forth in SEQ ID NOs: 172, 192 and 216, respectively; and the heavy chain variable region VH comprises HCDR1, HCDR2 and HCDR3 with amino acid sequences as set forth in SEQ ID NOs: 30, 68 and 128, respectively; and the protein functional region B comprises a heavy chain variable region, wherein the heavy chain variable region VH comprises HCDR1, HCDR2 and HCDR3 with amino acid sequences as set forth in SEQ ID NOs: 34, 76 and 136, respectively; or,
the protein functional region A comprises a light chain variable region and a heavy chain variable region, wherein the light chain variable region VL comprises LCDR1, LCDR2 and LCDR3 with amino acid sequences as set forth in SEQ ID NOs: 172, 192 and 216, respectively; and the heavy chain variable region VH comprises HCDR1, HCDR2 and HCDR3 with amino acid sequences as set forth in SEQ ID NOs: 30, 68 and 128, respectively; and the protein functional region B comprises a heavy chain variable region, wherein the heavy chain variable region VH comprises HCDR1, HCDR2 and HCDR3 with amino acid sequences as set forth in SEQ ID NOs: 35, 76 and 146, respectively; or,
the protein functional region A comprises a light chain variable region and a heavy chain variable region, wherein the light chain variable region VL comprises LCDR1, LCDR2 and LCDR3 with amino acid sequences as set forth in SEQ ID NOs: 172, 192 and 216, respectively; and the heavy chain variable region VH comprises HCDR1, HCDR2 and HCDR3 with amino acid sequences as set forth in SEQ ID NOs: 30, 68 and 128, respectively; and the protein functional region B comprises a heavy chain variable region, wherein the heavy chain variable region VH comprises HCDR1, HCDR2 and HCDR3 with amino acid sequences as set forth in SEQ ID NOs: 34, 76 and 146, respectively; or,
the protein functional region A comprises a light chain variable region and a heavy chain variable region, wherein the light chain variable region VL comprises LCDR1, LCDR2 and LCDR3 with amino acid sequences as set forth in SEQ ID NOs: 172, 192 and 216, respectively; and the heavy chain variable region VH comprises HCDR1, HCDR2 and HCDR3 with amino acid sequences as set forth in SEQ ID NOs: 30, 68 and 128, respectively; and the protein functional region B comprises a heavy chain variable region, wherein the heavy chain variable region VH comprises HCDR1, HCDR2 and HCDR3 with amino acid sequences as set forth in SEQ ID NOs: 35, 90 and 148, respectively; or,
the protein functional region A comprises a light chain variable region and a heavy chain variable region, wherein the light chain variable region VL comprises LCDR1, LCDR2 and LCDR3 with amino acid sequences as set forth in SEQ ID NOs: 172, 192 and 216, respectively; and the heavy chain variable region VH comprises HCDR1, HCDR2 and HCDR3 with amino acid sequences as set forth in SEQ ID NOs: 30, 68 and 128, respectively; and the protein functional region B comprises a heavy chain variable region, wherein the heavy chain variable region VH comprises HCDR1, HCDR2 and HCDR3 with amino acid sequences as set forth in SEQ ID NOs: 35, 90 and 136, respectively; or,
the protein functional region A comprises a light chain variable region and a heavy chain variable region, wherein the light chain variable region VL comprises LCDR1, LCDR2 and LCDR3 with amino acid sequences as set forth in SEQ ID NOs: 172, 192 and 216, respectively; and the heavy chain variable region VH comprises HCDR1, HCDR2 and HCDR3 with amino acid sequences as set forth in SEQ ID NOs: 30, 68 and 128, respectively; and the protein functional region B comprises a heavy chain variable region, wherein the heavy chain variable region VH comprises HCDR1, HCDR2 and HCDR3 with amino acid sequences as set forth in SEQ ID NOs: 34, 78 and 146, respectively; or,
the protein functional region A comprises a light chain variable region and a heavy chain variable region, wherein the light chain variable region VL comprises LCDR1, LCDR2 and LCDR3 with amino acid sequences as set forth in SEQ ID NOs: 172, 192 and 216, respectively; and the heavy chain variable region VH comprises HCDR1, HCDR2 and HCDR3 with amino acid sequences as set forth in SEQ ID NOs: 30, 68 and 128, respectively; and the protein functional region B comprises a heavy chain variable region, wherein the heavy chain variable region VH comprises HCDR1, HCDR2 and HCDR3 with amino acid sequences as set forth in SEQ ID NOs: 35, 78 and 147, respectively; or,
the protein functional region A comprises a light chain variable region and a heavy chain variable region, wherein the light chain variable region VL comprises LCDR1, LCDR2 and LCDR3 with amino acid sequences as set forth in SEQ ID NOs: 172, 192 and 216, respectively; and the heavy chain variable region VH comprises HCDR1, HCDR2 and HCDR3 with amino acid sequences as set forth in SEQ ID NOs: 30, 68 and 128, respectively; and the protein functional region B comprises a heavy chain variable region, wherein the heavy chain variable region VH comprises HCDR1, HCDR2 and HCDR3 with amino acid sequences as set forth in SEQ ID NOs: 35, 90 and 147, respectively; or,
the protein functional region A comprises a light chain variable region and a heavy chain variable region, wherein the light chain variable region VL comprises LCDR1, LCDR2 and LCDR3 with amino acid sequences as set forth in SEQ ID NOs: 177, 191 and 221, respectively; and the heavy chain variable region VH comprises HCDR1, HCDR2 and HCDR3 with amino acid sequences as set forth in SEQ ID NOs: 15, 84 and 141, respectively; and the protein functional region B comprises a heavy chain variable region, wherein the heavy chain variable region VH comprises HCDR1, HCDR2 and HCDR3 with amino acid sequences as set forth in SEQ ID NOs: 26, 78 and 136, respectively; or,
the protein functional region A comprises a light chain variable region and a heavy chain variable region, wherein the light chain variable region VL comprises LCDR1, LCDR2 and LCDR3 with amino acid sequences as set forth in SEQ ID NOs: 178, 197 and 222, respectively; and the heavy chain variable region VH comprises HCDR1, HCDR2 and HCDR3 with amino acid sequences as set forth in SEQ ID NOs: 31, 85 and 142, respectively; and the protein functional region B comprises a heavy chain variable region, wherein the heavy chain variable region VH comprises HCDR1, HCDR2 and HCDR3 with amino acid sequences as set forth in SEQ ID NOs: 26, 78 and 136, respectively; or,
the protein functional region A comprises a light chain variable region and a heavy chain variable region, wherein the light chain variable region VL comprises LCDR1, LCDR2 and LCDR3 with amino acid sequences as set forth in SEQ ID NOs: 177, 191 and 223, respectively; and the heavy chain variable region VH comprises HCDR1, HCDR2 and HCDR3 with amino acid sequences as set forth in SEQ ID NOs: 31, 86 and 141, respectively; and the protein functional region B comprises a heavy chain variable region, wherein the heavy chain variable region VH comprises HCDR1, HCDR2 and HCDR3 with amino acid sequences as set forth in SEQ ID NOs: 26, 78 and 136, respectively; or,
the protein functional region A comprises a light chain variable region and a heavy chain variable region, wherein the light chain variable region VL comprises LCDR1, LCDR2 and LCDR3 with amino acid sequences as set forth in SEQ ID NOs: 179, 198 and 224, respectively; and the heavy chain variable region VH comprises HCDR1, HCDR2 and HCDR3 with amino acid sequences as set forth in SEQ ID NOs: 31, 85 and 142, respectively; and the protein functional region B comprises a heavy chain variable region, wherein the heavy chain variable region VH comprises HCDR1, HCDR2 and HCDR3 with amino acid sequences as set forth in SEQ ID NOs: 26, 78 and 136, respectively; or
the protein functional region A comprises a light chain variable region and a heavy chain variable region, wherein the light chain variable region VL comprises LCDR1, LCDR2 and LCDR3 with amino acid sequences as set forth in SEQ ID NOs: 172, 192 and 216, respectively; and the heavy chain variable region VH comprises HCDR1, HCDR2 and HCDR3 with amino acid sequences as set forth in SEQ ID NOs: 20, 68 and 128, respectively; and the protein functional region B comprises a heavy chain variable region, wherein the heavy chain variable region VH comprises HCDR1, HCDR2 and HCDR3 with amino acid sequences as set forth in SEQ ID NOs: 24, 76 and 134, respectively; or,
the protein functional region A comprises a light chain variable region and a heavy chain variable region, wherein the light chain variable region VL comprises LCDR1, LCDR2 and LCDR3 with amino acid sequences as set forth in SEQ ID NOs: 172, 192 and 216, respectively; and the heavy chain variable region VH comprises HCDR1, HCDR2 and HCDR3 with amino acid sequences as set forth in SEQ ID NOs: 20, 68 and 128, respectively; and the protein functional region B comprises a heavy chain variable region, wherein the heavy chain variable region VH comprises HCDR1, HCDR2 and HCDR3 with amino acid sequences as set forth in SEQ ID NOs: 15, 75 and 133, respectively; or,
the protein functional region A comprises a light chain variable region and a heavy chain variable region, wherein the light chain variable region VL comprises LCDR1, LCDR2 and LCDR3 with amino acid sequences as set forth in SEQ ID NOs: 172, 192 and 216, respectively; and the heavy chain variable region VH comprises HCDR1, HCDR2 and HCDR3 with amino acid sequences as set forth in SEQ ID NOs: 30, 68 and 128, respectively; and the protein functional region B comprises a heavy chain variable region, wherein the heavy chain variable region VH comprises HCDR1, HCDR2 and HCDR3 with amino acid sequences as set forth in SEQ ID NOs: 15, 75 and 133, respectively; or,
the protein functional region A comprises a light chain variable region and a heavy chain variable region, wherein the light chain variable region VL comprises LCDR1, LCDR2 and LCDR3 with amino acid sequences as set forth in SEQ ID NOs: 167, 188 and 211, respectively; and the heavy chain variable region VH comprises HCDR1, HCDR2 and HCDR3 with amino acid sequences as set forth in SEQ ID NOs: 15, 69 and 122, respectively; and the protein functional region B comprises a heavy chain variable region, wherein the heavy chain variable region VH comprises HCDR1, HCDR2 and HCDR3 with amino acid sequences as set forth in SEQ ID NOs: 17, 65 and 125, respectively; or,
the protein functional region A comprises a light chain variable region and a heavy chain variable region, wherein the light chain variable region VL comprises LCDR1, LCDR2 and LCDR3 with amino acid sequences as set forth in SEQ ID NOs: 167, 188 and 211, respectively; and the heavy chain variable region VH comprises HCDR1, HCDR2 and HCDR3 with amino acid sequences as set forth in SEQ ID NOs: 15, 62 and 122, respectively; and the protein functional region B comprises a heavy chain variable region, wherein the heavy chain variable region VH comprises HCDR1, HCDR2 and HCDR3 with amino acid sequences as set forth in SEQ ID NOs: 17, 65 and 125, respectively; or,
the protein functional region A comprises a light chain variable region and a heavy chain variable region, wherein the light chain variable region VL comprises LCDR1, LCDR2 and LCDR3 with amino acid sequences as set forth in SEQ ID NOs: 171, 190 and 215, respectively; and the heavy chain variable region VH comprises HCDR1, HCDR2 and HCDR3 with amino acid sequences as set forth in SEQ ID NOs: 19, 67 and 127, respectively; and the protein functional region B comprises a heavy chain variable region, wherein the heavy chain variable region VH comprises HCDR1, HCDR2 and HCDR3 with amino acid sequences as set forth in SEQ ID NOs: 17, 65 and 125, respectively; or,
the protein functional region A comprises a light chain variable region and a heavy chain variable region, wherein the light chain variable region VL comprises LCDR1, LCDR2 and LCDR3 with amino acid sequences as set forth in SEQ ID NOs: 176, 196 and 220, respectively; and the heavy chain variable region VH comprises HCDR1, HCDR2 and HCDR3 with amino acid sequences as set forth in SEQ ID NOs: 23, 74 and 132, respectively; and the protein functional region B comprises a heavy chain variable region, wherein the heavy chain variable region VH comprises HCDR1, HCDR2 and HCDR3 with amino acid sequences as set forth in SEQ ID NOs: 17, 65 and 125, respectively; or,
the protein functional region A comprises a light chain variable region and a heavy chain variable region, wherein the light chain variable region VL comprises LCDR1, LCDR2 and LCDR3 with amino acid sequences as set forth in SEQ ID NOs: 167, 188 and 211, respectively; and the heavy chain variable region VH comprises HCDR1, HCDR2 and HCDR3 with amino acid sequences as set forth in SEQ ID NOs: 15, 69 and 122, respectively; and the protein functional region B comprises a heavy chain variable region, wherein the heavy chain variable region VH comprises HCDR1, HCDR2 and HCDR3 with amino acid sequences as set forth in SEQ ID NOs: 28, 80 and 138, respectively; or,
the protein functional region A comprises a light chain variable region and a heavy chain variable region, wherein the light chain variable region VL comprises LCDR1, LCDR2 and LCDR3 with amino acid sequences as set forth in SEQ ID NOs: 167, 188 and 211, respectively; and the heavy chain variable region VH comprises HCDR1, HCDR2 and HCDR3 with amino acid sequences as set forth in SEQ ID NOs: 15, 69 and 122, respectively; and the protein functional region B comprises a heavy chain variable region, wherein the heavy chain variable region VH comprises HCDR1, HCDR2 and HCDR3 with amino acid sequences as set forth in SEQ ID NOs: 27, 79 and 137, respectively; or,
the protein functional region A comprises a light chain variable region and a heavy chain variable region, wherein the light chain variable region VL comprises LCDR1, LCDR2 and LCDR3 with amino acid sequences as set forth in SEQ ID NOs: 167, 188 and 211, respectively; and the heavy chain variable region VH comprises HCDR1, HCDR2 and HCDR3 with amino acid sequences as set forth in SEQ ID NOs: 15, 69 and 122, respectively; and the protein functional region B comprises a heavy chain variable region, wherein the heavy chain variable region VH comprises HCDR1, HCDR2 and HCDR3 with amino acid sequences as set forth in SEQ ID NOs: 29, 82 and 138, respectively; or,
the protein functional region A comprises a light chain variable region and a heavy chain variable region, wherein the light chain variable region VL comprises LCDR1, LCDR2 and LCDR3 with amino acid sequences as set forth in SEQ ID NOs: 180, 191 and 225, respectively; and the heavy chain variable region VH comprises HCDR1, HCDR2 and HCDR3 with amino acid sequences as set forth in SEQ ID NOs: 32, 87 and 143, respectively; and the protein functional region B comprises a heavy chain variable region, wherein the heavy chain variable region VH comprises HCDR1, HCDR2 and HCDR3 with amino acid sequences as set forth in SEQ ID NOs: 28, 80 and 138, respectively; or,
the protein functional region A comprises a light chain variable region and a heavy chain variable region, wherein the light chain variable region VL comprises LCDR1, LCDR2 and LCDR3 with amino acid sequences as set forth in SEQ ID NOs: 180, 191 and 225, respectively; and the heavy chain variable region VH comprises HCDR1, HCDR2 and HCDR3 with amino acid sequences as set forth in SEQ ID NOs: 32, 87 and 143, respectively; and the protein functional region B comprises a heavy chain variable region, wherein the heavy chain variable region VH comprises HCDR1, HCDR2 and HCDR3 with amino acid sequences as set forth in SEQ ID NOs: 27, 79 and 137, respectively; or,
the protein functional region A comprises a light chain variable region and a heavy chain variable region, wherein the light chain variable region VL comprises LCDR1, LCDR2 and LCDR3 with amino acid sequences as set forth in SEQ ID NOs: 180, 191 and 225, respectively; and the heavy chain variable region VH comprises HCDR1, HCDR2 and HCDR3 with amino acid sequences as set forth in SEQ ID NOs: 32, 87 and 143, respectively; and the protein functional region B comprises a heavy chain variable region, wherein the heavy chain variable region VH comprises HCDR1, HCDR2 and HCDR3 with amino acid sequences as set forth in SEQ ID NOs: 28, 89 and 145, respectively; or,
the protein functional region A comprises a light chain variable region and a heavy chain variable region, wherein the light chain variable region VL comprises LCDR1, LCDR2 and LCDR3 with amino acid sequences as set forth in SEQ ID NOs: 177, 191 and 226, respectively; and the heavy chain variable region VH comprises HCDR1, HCDR2 and HCDR3 with amino acid sequences as set forth in SEQ ID NOs: 33, 88 and 144, respectively; and the protein functional region B comprises a heavy chain variable region, wherein the heavy chain variable region VH comprises HCDR1, HCDR2 and HCDR3 with amino acid sequences as set forth in SEQ ID NOs: 28, 80 and 138, respectively; or,
the protein functional region A comprises a light chain variable region and a heavy chain variable region, wherein the light chain variable region VL comprises LCDR1, LCDR2 and LCDR3 with amino acid sequences as set forth in SEQ ID NOs: 177, 191 and 226, respectively; and the heavy chain variable region VH comprises HCDR1, HCDR2 and HCDR3 with amino acid sequences as set forth in SEQ ID NOs: 33, 88 and 144, respectively; and the protein functional region B comprises a heavy chain variable region, wherein the heavy chain variable region VH comprises HCDR1, HCDR2 and HCDR3 with amino acid sequences as set forth in SEQ ID NOs: 28, 81 and 139, respectively; or,
the protein functional region A comprises a light chain variable region and a heavy chain variable region, wherein the light chain variable region VL comprises LCDR1, LCDR2 and LCDR3 with amino acid sequences as set forth in SEQ ID NOs: 177, 191 and 226, respectively; and the heavy chain variable region VH comprises HCDR1, HCDR2 and HCDR3 with amino acid sequences as set forth in SEQ ID NOs: 33, 88 and 144, respectively; and the protein functional region B comprises a heavy chain variable region, wherein the heavy chain variable region VH comprises HCDR1, HCDR2 and HCDR3 with amino acid sequences as set forth in SEQ ID NOs: 15, 83 and 140, respectively; or,
(B) comprising a protein functional region A, a protein functional region B and a protein functional region C, wherein:
the protein functional region A comprises a light chain variable region and a heavy chain variable region, wherein the light chain variable region VL comprises LCDR1, LCDR2 and LCDR3 with amino acid sequences as set forth in SEQ ID NOs: 172, 192 and 216, respectively; and the heavy chain variable region VH comprises HCDR1, HCDR2 and HCDR3 with amino acid sequences as set forth in SEQ ID NOs: 30, 68 and 128, respectively; the protein functional region B comprises a heavy chain variable region, wherein the heavy chain variable region VH comprises HCDR1, HCDR2 and HCDR3 with amino acid sequences as set forth in SEQ ID NOs: 25, 77 and 135, respectively; and the protein functional region C comprises a heavy chain variable region, wherein the heavy chain variable region VH comprises HCDR1, HCDR2 and HCDR3 with amino acid sequences as set forth in SEQ ID NOs: 26, 78 and 136, respectively; or
the protein functional region A comprises a light chain variable region and a heavy chain variable region, wherein the light chain variable region VL comprises LCDR1, LCDR2 and LCDR3 with amino acid sequences as set forth in SEQ ID NOs: 172, 192 and 216, respectively; and the heavy chain variable region VH comprises HCDR1, HCDR2 and HCDR3 with amino acid sequences as set forth in SEQ ID NOs: 30, 68 and 128, respectively; the protein functional region B comprises a heavy chain variable region, wherein the heavy chain variable region VH comprises HCDR1, HCDR2 and HCDR3 with amino acid sequences as set forth in SEQ ID NOs: 15, 75 and 133, respectively; and the protein functional region C comprises a heavy chain variable region, wherein the heavy chain variable region VH comprises HCDR1, HCDR2 and HCDR3 with amino acid sequences as set forth in SEQ ID NOs: 24, 76 and 134, respectively.

26. The binding protein according to claim 20,
(A) comprising a protein functional region A and a protein functional region B, wherein:
the protein functional region A comprises a light chain variable region and a heavy chain variable region, wherein the light chain variable region VL comprises an amino acid sequence as set forth in SEQ ID NO: 291; and the heavy chain variable region VH comprises an amino acid sequence as set forth in SEQ ID NO: 263; and the protein functional region B comprises a heavy chain variable region, wherein the heavy chain variable region VH comprises an amino acid sequence as set forth in SEQ ID NO: 251; or,
the protein functional region A comprises a light chain variable region and a heavy chain variable region, wherein the light chain variable region VL comprises an amino acid sequence as set forth in SEQ ID NO: 291; and the heavy chain variable region VH comprises an amino acid sequence as set forth in SEQ ID NO: 245; and the protein functional region B comprises a heavy chain variable region, wherein the heavy chain variable region VH comprises an amino acid sequence as set forth in SEQ ID NO: 251; or,
the protein functional region A comprises a light chain variable region and a heavy chain variable region, wherein the light chain variable region VL comprises an amino acid sequence as set forth in SEQ ID NO: 291; and the heavy chain variable region VH comprises an amino acid sequence as set forth in SEQ ID NO: 257; and the protein functional region B comprises a heavy chain variable region, wherein the heavy chain variable region VH comprises an amino acid sequence as set forth in SEQ ID NO: 251; or,
the protein functional region A comprises a light chain variable region and a heavy chain variable region, wherein the light chain variable region VL comprises an amino acid sequence as set forth in SEQ ID NO: 291; and the heavy chain variable region VH comprises an amino acid sequence as set forth in SEQ ID NO: 281; and the protein functional region B comprises a heavy chain variable region, wherein the heavy chain variable region VH comprises an amino acid sequence as set forth in SEQ ID NO: 251; or,
the protein functional region A comprises a light chain variable region and a heavy chain variable region, wherein the light chain variable region VL comprises an amino acid sequence as set forth in SEQ ID NO: 291; and the heavy chain variable region VH comprises an amino acid sequence as set forth in SEQ ID NO: 263; and the protein functional region B comprises a heavy chain variable region, wherein the heavy chain variable region VH comprises an amino acid sequence as set forth in SEQ ID NO: 265; or,
the protein functional region A comprises a light chain variable region and a heavy chain variable region, wherein the light chain variable region VL comprises an amino acid sequence as set forth in SEQ ID NO: 291; and the heavy chain variable region VH comprises an amino acid sequence as set forth in SEQ ID NO: 263; and the protein functional region B comprises a heavy chain variable region, wherein the heavy chain variable region VH comprises an amino acid sequence as set forth in SEQ ID NO: 269; or,
the protein functional region A comprises a light chain variable region and a heavy chain variable region, wherein the light chain variable region VL comprises an amino acid sequence as set forth in SEQ ID NO: 291; and the heavy chain variable region VH comprises an amino acid sequence as set forth in SEQ ID NO: 263; and the protein functional region B comprises a heavy chain variable region, wherein the heavy chain variable region VH comprises an amino acid sequence as set forth in SEQ ID NO: 270; or,
the protein functional region A comprises a light chain variable region and a heavy chain variable region, wherein the light chain variable region VL comprises an amino acid sequence as set forth in SEQ ID NO: 291; and the heavy chain variable region VH comprises an amino acid sequence as set forth in SEQ ID NO: 263; and the protein functional region B comprises a heavy chain variable region, wherein the heavy chain variable region VH comprises an amino acid sequence as set forth in SEQ ID NO: 271; or,
the protein functional region A comprises a light chain variable region and a heavy chain variable region, wherein the light chain variable region VL comprises an amino acid sequence as set forth in SEQ ID NO: 291; and the heavy chain variable region VH comprises an amino acid sequence as set forth in SEQ ID NO: 263; and the protein functional region B comprises a heavy chain variable region, wherein the heavy chain variable region VH comprises an amino acid sequence as set forth in SEQ ID NO: 272; or,
the protein functional region A comprises a light chain variable region and a heavy chain variable region, wherein the light chain variable region VL comprises an amino acid sequence as set forth in SEQ ID NO: 291; and the heavy chain variable region VH comprises an amino acid sequence as set forth in SEQ ID NO: 263; and the protein functional region B comprises a heavy chain variable region, wherein the heavy chain variable region VH comprises an amino acid sequence as set forth in SEQ ID NO: 273; or,
the protein functional region A comprises a light chain variable region and a heavy chain variable region, wherein the light chain variable region VL comprises an amino acid sequence as set forth in SEQ ID NO: 291; and the heavy chain variable region VH comprises an amino acid sequence as set forth in SEQ ID NO: 263; and the protein functional region B comprises a heavy chain variable region, wherein the heavy chain variable region VH comprises an amino acid sequence as set forth in SEQ ID NO: 274; or,
the protein functional region A comprises a light chain variable region and a heavy chain variable region, wherein the light chain variable region VL comprises an amino acid sequence as set forth in SEQ ID NO: 291; and the heavy chain variable region VH comprises an amino acid sequence as set forth in SEQ ID NO: 263; and the protein functional region B comprises a heavy chain variable region, wherein the heavy chain variable region VH comprises an amino acid sequence as set forth in SEQ ID NO: 275; or,
the protein functional region A comprises a light chain variable region and a heavy chain variable region, wherein the light chain variable region VL comprises an amino acid sequence as set forth in SEQ ID NO: 291; and the heavy chain variable region VH comprises an amino acid sequence as set forth in SEQ ID NO: 263; and the protein functional region B comprises a heavy chain variable region, wherein the heavy chain variable region VH comprises an amino acid sequence as set forth in SEQ ID NO: 276; or,
the protein functional region A comprises a light chain variable region and a heavy chain variable region, wherein the light chain variable region VL comprises an amino acid sequence as set forth in SEQ ID NO: 291; and the heavy chain variable region VH comprises an amino acid sequence as set forth in SEQ ID NO: 263; and the protein functional region B comprises a heavy chain variable region, wherein the heavy chain variable region VH comprises an amino acid sequence as set forth in SEQ ID NO: 277; or,
the protein functional region A comprises a light chain variable region and a heavy chain variable region, wherein the light chain variable region VL comprises an amino acid sequence as set forth in SEQ ID NO: 291; and the heavy chain variable region VH comprises an amino acid sequence as set forth in SEQ ID NO: 263; and the protein functional region B comprises a heavy chain variable region, wherein the heavy chain variable region VH comprises an amino acid sequence as set forth in SEQ ID NO: 278; or,
the protein functional region A comprises a light chain variable region and a heavy chain variable region, wherein the light chain variable region VL comprises an amino acid sequence as set forth in SEQ ID NO: 291; and the heavy chain variable region VH comprises an amino acid sequence as set forth in SEQ ID NO: 263; and the protein functional region B comprises a heavy chain variable region, wherein the heavy chain variable region VH comprises an amino acid sequence as set forth in SEQ ID NO: 279; or,
the protein functional region A comprises a light chain variable region and a heavy chain variable region, wherein the light chain variable region VL comprises an amino acid sequence as set forth in SEQ ID NO: 291; and the heavy chain variable region VH comprises an amino acid sequence as set forth in SEQ ID NO: 263; and the protein functional region B comprises a heavy chain variable region, wherein the heavy chain variable region VH comprises an amino acid sequence as set forth in SEQ ID NO: 280; or,
the protein functional region A comprises a light chain variable region and a heavy chain variable region, wherein the light chain variable region VL comprises an amino acid sequence as set forth in SEQ ID NO: 291; and the heavy chain variable region VH comprises an amino acid sequence as set forth in SEQ ID NO: 263; and the protein functional region B comprises a heavy chain variable region, wherein the heavy chain variable region VH comprises an amino acid sequence as set forth in SEQ ID NO: 266; or,
the protein functional region A comprises a light chain variable region and a heavy chain variable region, wherein the light chain variable region VL comprises an amino acid sequence as set forth in SEQ ID NO: 291; and the heavy chain variable region VH comprises an amino acid sequence as set forth in SEQ ID NO: 263; and the protein functional region B comprises a heavy chain variable region, wherein the heavy chain variable region VH comprises an amino acid sequence as set forth in SEQ ID NO: 267; or,
the protein functional region A comprises a light chain variable region and a heavy chain variable region, wherein the light chain variable region VL comprises an amino acid sequence as set forth in SEQ ID NO: 291; and the heavy chain variable region VH comprises an amino acid sequence as set forth in SEQ ID NO: 263; and the protein functional region B comprises a heavy chain variable region, wherein the heavy chain variable region VH comprises an amino acid sequence as set forth in SEQ ID NO: 268; or,
the protein functional region A comprises a light chain variable region and a heavy chain variable region, wherein the light chain variable region VL comprises an amino acid sequence as set forth in SEQ ID NO: 291; and the heavy chain variable region VH comprises an amino acid sequence as set forth in SEQ ID NO: 244; and the protein functional region B comprises a heavy chain variable region, wherein the heavy chain variable region VH comprises an amino acid sequence as set forth in SEQ ID NO: 249; or,
the protein functional region A comprises a light chain variable region and a heavy chain variable region, wherein the light chain variable region VL comprises an amino acid sequence as set forth in SEQ ID NO: 291; and the heavy chain variable region VH comprises an amino acid sequence as set forth in SEQ ID NO: 244; and the protein functional region B comprises a heavy chain variable region, wherein the heavy chain variable region VH comprises an amino acid sequence as set forth in SEQ ID NO: 251; or,
the protein functional region A comprises a light chain variable region and a heavy chain variable region, wherein the light chain variable region VL comprises an amino acid sequence as set forth in SEQ ID NO: 294; and the heavy chain variable region VH comprises an amino acid sequence as set forth in SEQ ID NO: 258; and the protein functional region B comprises a heavy chain variable region, wherein the heavy chain variable region VH comprises an amino acid sequence as set forth in SEQ ID NO: 251; or,
the protein functional region A comprises a light chain variable region and a heavy chain variable region, wherein the light chain variable region VL comprises an amino acid sequence as set forth in SEQ ID NO: 295; and the heavy chain variable region VH comprises an amino acid sequence as set forth in SEQ ID NO: 259; and the protein functional region B comprises a heavy chain variable region, wherein the heavy chain variable region VH comprises an amino acid sequence as set forth in SEQ ID NO: 251; or,
the protein functional region A comprises a light chain variable region and a heavy chain variable region, wherein the light chain variable region VL comprises an amino acid sequence as set forth in SEQ ID NO: 296; and the heavy chain variable region VH comprises an amino acid sequence as set forth in SEQ ID NO: 260; and the protein functional region B comprises a heavy chain variable region, wherein the heavy chain variable region VH comprises an amino acid sequence as set forth in SEQ ID NO: 251; or,
the protein functional region A comprises a light chain variable region and a heavy chain variable region, wherein the light chain variable region VL comprises an amino acid sequence as set forth in SEQ ID NO: 297; and the heavy chain variable region VH comprises an amino acid sequence as set forth in SEQ ID NO: 259; and the protein functional region B comprises a heavy chain variable region, wherein the heavy chain variable region VH comprises an amino acid sequence as set forth in SEQ ID NO: 251; or
the protein functional region A comprises a light chain variable region and a heavy chain variable region, wherein the light chain variable region VL comprises an amino acid sequence as set forth in SEQ ID NO: 291; and the heavy chain variable region VH comprises an amino acid sequence as set forth in SEQ ID NO: 245; and the protein functional region B comprises a heavy chain variable region, wherein the heavy chain variable region VH comprises an amino acid sequence as set forth in SEQ ID NO: 249; or,
the protein functional region A comprises a light chain variable region and a heavy chain variable region, wherein the light chain variable region VL comprises an amino acid sequence as set forth in SEQ ID NO: 291; and the heavy chain variable region VH comprises an amino acid sequence as set forth in SEQ ID NO: 245; and the protein functional region B comprises a heavy chain variable region, wherein the heavy chain variable region VH comprises an amino acid sequence as set forth in SEQ ID NO: 248; or,
the protein functional region A comprises a light chain variable region and a heavy chain variable region, wherein the light chain variable region VL comprises an amino acid sequence as set forth in SEQ ID NO: 291; and the heavy chain variable region VH comprises an amino acid sequence as set forth in SEQ ID NO: 257; and the protein functional region B comprises a heavy chain variable region, wherein the heavy chain variable region VH comprises an amino acid sequence as set forth in SEQ ID NO: 248; or,
the protein functional region A comprises a light chain variable region and a heavy chain variable region, wherein the light chain variable region VL comprises an amino acid sequence as set forth in SEQ ID NO: 282; and the heavy chain variable region VH comprises an amino acid sequence as set forth in SEQ ID NO: 240; and the protein functional region B comprises a heavy chain variable region, wherein the heavy chain variable region VH comprises an amino acid sequence as set forth in SEQ ID NO: 236; or,
the protein functional region A comprises a light chain variable region and a heavy chain variable region, wherein the light chain variable region VL comprises an amino acid sequence as set forth in SEQ ID NO: 282; and the heavy chain variable region VH comprises an amino acid sequence as set forth in SEQ ID NO: 233; and the protein functional region B comprises a heavy chain variable region, wherein the heavy chain variable region VH comprises an amino acid sequence as set forth in SEQ ID NO: 236; or,
the protein functional region A comprises a light chain variable region and a heavy chain variable region, wherein the light chain variable region VL comprises an amino acid sequence as set forth in SEQ ID NO: 286; and the heavy chain variable region VH comprises an amino acid sequence as set forth in SEQ ID NO: 238; and the protein functional region B comprises a heavy chain variable region, wherein the heavy chain variable region VH comprises an amino acid sequence as set forth in SEQ ID NO: 236; or,
the protein functional region A comprises a light chain variable region and a heavy chain variable region, wherein the light chain variable region VL comprises an amino acid sequence as set forth in SEQ ID NO: 293; and the heavy chain variable region VH comprises an amino acid sequence as set forth in SEQ ID NO: 247; and the protein functional region B comprises a heavy chain variable region, wherein the heavy chain variable region VH comprises an amino acid sequence as set forth in SEQ ID NO: 236; or,
the protein functional region A comprises a light chain variable region and a heavy chain variable region, wherein the light chain variable region VL comprises an amino acid sequence as set forth in SEQ ID NO: 282; and the heavy chain variable region VH comprises an amino acid sequence as set forth in SEQ ID NO: 240; and the protein functional region B comprises a heavy chain variable region, wherein the heavy chain variable region VH comprises an amino acid sequence as set forth in SEQ ID NO: 253; or,
the protein functional region A comprises a light chain variable region and a heavy chain variable region, wherein the light chain variable region VL comprises an amino acid sequence as set forth in SEQ ID NO: 282; and the heavy chain variable region VH comprises an amino acid sequence as set forth in SEQ ID NO: 240; and the protein functional region B comprises a heavy chain variable region, wherein the heavy chain variable region VH comprises an amino acid sequence as set forth in SEQ ID NO: 252; or,
the protein functional region A comprises a light chain variable region and a heavy chain variable region, wherein the light chain variable region VL comprises an amino acid sequence as set forth in SEQ ID NO: 282; and the heavy chain variable region VH comprises an amino acid sequence as set forth in SEQ ID NO: 240; and the protein functional region B comprises a heavy chain variable region, wherein the heavy chain variable region VH comprises an amino acid sequence as set forth in SEQ ID NO: 255; or,
the protein functional region A comprises a light chain variable region and a heavy chain variable region, wherein the light chain variable region VL comprises an amino acid sequence as set forth in SEQ ID NO: 298; and the heavy chain variable region VH comprises an amino acid sequence as set forth in SEQ ID NO: 261; and the protein functional region B comprises a heavy chain variable region, wherein the heavy chain variable region VH comprises an amino acid sequence as set forth in SEQ ID NO: 253; or,
the protein functional region A comprises a light chain variable region and a heavy chain variable region, wherein the light chain variable region VL comprises an amino acid sequence as set forth in SEQ ID NO: 298; and the heavy chain variable region VH comprises an amino acid sequence as set forth in SEQ ID NO: 261; and the protein functional region B comprises a heavy chain variable region, wherein the heavy chain variable region VH comprises an amino acid sequence as set forth in SEQ ID NO: 252; or,
the protein functional region A comprises a light chain variable region and a heavy chain variable region, wherein the light chain variable region VL comprises an amino acid sequence as set forth in SEQ ID NO: 298; and the heavy chain variable region VH comprises an amino acid sequence as set forth in SEQ ID NO: 261; and the protein functional region B comprises a heavy chain variable region, wherein the heavy chain variable region VH comprises an amino acid sequence as set forth in SEQ ID NO: 264; or,
the protein functional region A comprises a light chain variable region and a heavy chain variable region, wherein the light chain variable region VL comprises an amino acid sequence as set forth in SEQ ID NO: 299; and the heavy chain variable region VH comprises an amino acid sequence as set forth in SEQ ID NO: 262; and the protein functional region B comprises a heavy chain variable region, wherein the heavy chain variable region VH comprises an amino acid sequence as set forth in SEQ ID NO: 253; or,
the protein functional region A comprises a light chain variable region and a heavy chain variable region, wherein the light chain variable region VL comprises an amino acid sequence as set forth in SEQ ID NO: 299; and the heavy chain variable region VH comprises an amino acid sequence as set forth in SEQ ID NO: 262; and the protein functional region B comprises a heavy chain variable region, wherein the heavy chain variable region VH comprises an amino acid sequence as set forth in SEQ ID NO: 254; or,
the protein functional region A comprises a light chain variable region and a heavy chain variable region, wherein the light chain variable region VL comprises an amino acid sequence as set forth in SEQ ID NO: 299; and the heavy chain variable region VH comprises an amino acid sequence as set forth in SEQ ID NO: 262; and the protein functional region B comprises a heavy chain variable region, wherein the heavy chain variable region VH comprises an amino acid sequence as set forth in SEQ ID NO: 256; or,
(B) comprising a protein functional region A, a protein functional region B and a protein functional region C, wherein:
the protein functional region A comprises a light chain variable region and a heavy chain variable region, wherein the light chain variable region VL comprises an amino acid sequence as set forth in SEQ ID NO: 291; and the heavy chain variable region VH comprises an amino acid sequence as set forth in SEQ ID NO: 257; the protein functional region B comprises a heavy chain variable region, wherein the heavy chain variable region VH comprises an amino acid sequence as set forth in SEQ ID NO: 250; and the protein functional region C comprises a heavy chain variable region, wherein the heavy chain variable region VH comprises an amino acid sequence as set forth in SEQ ID NO: 251; or,
the protein functional region A comprises a light chain variable region and a heavy chain variable region, wherein the light chain variable region VL comprises an amino acid sequence as set forth in SEQ ID NO: 291; and the heavy chain variable region VH comprises an amino acid sequence as set forth in SEQ ID NO: 257; the protein functional region B comprises a heavy chain variable region, wherein the heavy chain variable region VH comprises an amino acid sequence as set forth in SEQ ID NO: 248; and the protein functional region C comprises a heavy chain variable region, wherein the heavy chain variable region VH comprises an amino acid sequence as set forth in SEQ ID NO: 249.

27. The binding protein according to claim 20,
(1) comprising two polypeptide chains, wherein,
a first polypeptide chain comprises an amino acid sequence as set forth in SEQ ID NO: 371; and a second polypeptide chain comprises an amino acid sequence as set forth in SEQ ID NO: 372; or,
a first polypeptide chain comprises an amino acid sequence as set forth in SEQ ID NO: 371; and a second polypeptide chain comprises an amino acid sequence as set forth in SEQ ID NO: 373; or,
a first polypeptide chain comprises an amino acid sequence as set forth in SEQ ID NO: 353; and a second polypeptide chain comprises an amino acid sequence as set forth in SEQ ID NO: 362; or,
a first polypeptide chain comprises an amino acid sequence as set forth in SEQ ID NO: 363; and a second polypeptide chain comprises an amino acid sequence as set forth in SEQ ID NO: 364; or,
a first polypeptide chain comprises an amino acid sequence as set forth in SEQ ID NO: 365; and a second polypeptide chain comprises an amino acid sequence as set forth in SEQ ID NO: 364; or,
a first polypeptide chain comprises an amino acid sequence as set forth in SEQ ID NO: 353; and a second polypeptide chain comprises an amino acid sequence as set forth in SEQ ID NO: 366; or,
a first polypeptide chain comprises an amino acid sequence as set forth in SEQ ID NO: 353; and a second polypeptide chain comprises an amino acid sequence as set forth in SEQ ID NO: 369; or,
a first polypeptide chain comprises an amino acid sequence as set forth in SEQ ID NO: 353; and a second polypeptide chain comprises an amino acid sequence as set forth in SEQ ID NO: 370; or,
a first polypeptide chain comprises an amino acid sequence as set forth in SEQ ID NO: 353; and a second polypeptide chain comprises an amino acid sequence as set forth in SEQ ID NO: 394; or,
a first polypeptide chain comprises an amino acid sequence as set forth in SEQ ID NO: 353; and a second polypeptide chain comprises an amino acid sequence as set forth in SEQ ID NO: 395; or,
a first polypeptide chain comprises an amino acid sequence as set forth in SEQ ID NO: 363; and a second polypeptide chain comprises an amino acid sequence as set forth in SEQ ID NO: 310; or,
a first polypeptide chain comprises an amino acid sequence as set forth in SEQ ID NO: 363; and a second polypeptide chain comprises an amino acid sequence as set forth in SEQ ID NO: 396; or,
a first polypeptide chain comprises an amino acid sequence as set forth in SEQ ID NO: 363; and a second polypeptide chain comprises an amino acid sequence as set forth in SEQ ID NO: 362; or,
a first polypeptide chain comprises an amino acid sequence as set forth in SEQ ID NO: 363; and a second polypeptide chain comprises an amino acid sequence as set forth in SEQ ID NO: 394; or,
a first polypeptide chain comprises an amino acid sequence as set forth in SEQ ID NO: 363; and a second polypeptide chain comprises an amino acid sequence as set forth in SEQ ID NO: 395; or,
a first polypeptide chain comprises an amino acid sequence as set forth in SEQ ID NO: 367; and a second polypeptide chain comprises an amino acid sequence as set forth in SEQ ID NO: 368; or,
a first polypeptide chain comprises an amino acid sequence as set forth in SEQ ID NO: 367; and a second polypeptide chain comprises an amino acid sequence as set forth in SEQ ID NO: 378; or,
a first polypeptide chain comprises an amino acid sequence as set forth in SEQ ID NO: 367; and a second polypeptide chain comprises an amino acid sequence as set forth in SEQ ID NO: 379; or,
a first polypeptide chain comprises an amino acid sequence as set forth in SEQ ID NO: 367; and a second polypeptide chain comprises an amino acid sequence as set forth in SEQ ID NO: 380; or,
a first polypeptide chain comprises an amino acid sequence as set forth in SEQ ID NO: 367; and a second polypeptide chain comprises an amino acid sequence as set forth in SEQ ID NO: 381; or,
a first polypeptide chain comprises an amino acid sequence as set forth in SEQ ID NO: 367; and a second polypeptide chain comprises an amino acid sequence as set forth in SEQ ID NO: 382; or,
a first polypeptide chain comprises an amino acid sequence as set forth in SEQ ID NO: 367; and a second polypeptide chain comprises an amino acid sequence as set forth in SEQ ID NO: 383; or,
a first polypeptide chain comprises an amino acid sequence as set forth in SEQ ID NO: 367; and a second polypeptide chain comprises an amino acid sequence as set forth in SEQ ID NO: 385; or,
a first polypeptide chain comprises an amino acid sequence as set forth in SEQ ID NO: 367; and a second polypeptide chain comprises an amino acid sequence as set forth in SEQ ID NO: 388; or,
a first polypeptide chain comprises an amino acid sequence as set forth in SEQ ID NO: 367; and a second polypeptide chain comprises an amino acid sequence as set forth in SEQ ID NO: 389; or,
a first polypeptide chain comprises an amino acid sequence as set forth in SEQ ID NO: 351; and a second polypeptide chain comprises an amino acid sequence as set forth in SEQ ID NO: 374; or,
a first polypeptide chain comprises an amino acid sequence as set forth in SEQ ID NO: 351; and a second polypeptide chain comprises an amino acid sequence as set forth in SEQ ID NO: 375; or,
a first polypeptide chain comprises an amino acid sequence as set forth in SEQ ID NO: 351; and a second polypeptide chain comprises an amino acid sequence as set forth in SEQ ID NO: 386; or,
a first polypeptide chain comprises an amino acid sequence as set forth in SEQ ID NO: 351; and a second polypeptide chain comprises an amino acid sequence as set forth in SEQ ID NO: 387; or,
a first polypeptide chain comprises an amino acid sequence as set forth in SEQ ID NO: 351; and a second polypeptide chain comprises an amino acid sequence as set forth in SEQ ID NO: 401; or,
a first polypeptide chain comprises an amino acid sequence as set forth in SEQ ID NO: 402; and a second polypeptide chain comprises an amino acid sequence as set forth in SEQ ID NO: 305; or,
a first polypeptide chain comprises an amino acid sequence as set forth in SEQ ID NO: 351; and a second polypeptide chain comprises an amino acid sequence as set forth in SEQ ID NO: 403; or,
a first polypeptide chain comprises an amino acid sequence as set forth in SEQ ID NO: 402; and a second polypeptide chain comprises an amino acid sequence as set forth in SEQ ID NO: 409; or,
a first polypeptide chain comprises an amino acid sequence as set forth in SEQ ID NO: 359; and a second polypeptide chain comprises an amino acid sequence as set forth in SEQ ID NO: 404; or,
a first polypeptide chain comprises an amino acid sequence as set forth in SEQ ID NO: 405; and a second polypeptide chain comprises an amino acid sequence as set forth in SEQ ID NO: 315; or,
a first polypeptide chain comprises an amino acid sequence as set forth in SEQ ID NO: 359; and a second polypeptide chain comprises an amino acid sequence as set forth in SEQ ID NO: 406; or,
a first polypeptide chain comprises an amino acid sequence as set forth in SEQ ID NO: 351; and a second polypeptide chain comprises an amino acid sequence as set forth in SEQ ID NO: 376; or,
a first polypeptide chain comprises an amino acid sequence as set forth in SEQ ID NO: 351; and a second polypeptide chain comprises an amino acid sequence as set forth in SEQ ID NO: 377; or,
a first polypeptide chain comprises an amino acid sequence as set forth in SEQ ID NO: 351; and a second polypeptide chain comprises an amino acid sequence as set forth in SEQ ID NO: 397; or,
a first polypeptide chain comprises an amino acid sequence as set forth in SEQ ID NO: 351; and a second polypeptide chain comprises an amino acid sequence as set forth in SEQ ID NO: 398; or,
a first polypeptide chain comprises an amino acid sequence as set forth in SEQ ID NO: 351; and a second polypeptide chain comprises an amino acid sequence as set forth in SEQ ID NO: 399; or,
a first polypeptide chain comprises an amino acid sequence as set forth in SEQ ID NO: 351; and a second polypeptide chain comprises an amino acid sequence as set forth in SEQ ID NO: 400; or,
a first polypeptide chain comprises an amino acid sequence as set forth in SEQ ID NO: 402; and a second polypeptide chain comprises an amino acid sequence as set forth in SEQ ID NO: 401; or,
a first polypeptide chain comprises an amino acid sequence as set forth in SEQ ID NO: 402; and a second polypeptide chain comprises an amino acid sequence as set forth in SEQ ID NO: 403; or,
a first polypeptide chain comprises an amino acid sequence as set forth in SEQ ID NO: 405; and a second polypeptide chain comprises an amino acid sequence as set forth in SEQ ID NO: 404; or,
a first polypeptide chain comprises an amino acid sequence as set forth in SEQ ID NO: 405; and a second polypeptide chain comprises an amino acid sequence as set forth in SEQ ID NO: 406; or,
a first polypeptide chain comprises an amino acid sequence as set forth in SEQ ID NO: 371; and a second polypeptide chain comprises an amino acid sequence as set forth in SEQ ID NO: 486; or,
a first polypeptide chain comprises an amino acid sequence as set forth in SEQ ID NO: 353; and a second polypeptide chain comprises an amino acid sequence as set forth in SEQ ID NO: 460; or,
a first polypeptide chain comprises an amino acid sequence as set forth in SEQ ID NO: 353; and a second polypeptide chain comprises an amino acid sequence as set forth in SEQ ID NO: 461; or,
a first polypeptide chain comprises an amino acid sequence as set forth in SEQ ID NO: 353; and a second polypeptide chain comprises an amino acid sequence as set forth in SEQ ID NO: 462; or,
a first polypeptide chain comprises an amino acid sequence as set forth in SEQ ID NO: 487; and a second polypeptide chain comprises an amino acid sequence as set forth in SEQ ID NO: 488; or,
a first polypeptide chain comprises an amino acid sequence as set forth in SEQ ID NO: 360; and a second polypeptide chain comprises an amino acid sequence as set forth in SEQ ID NO: 455; or,
a first polypeptide chain comprises an amino acid sequence as set forth in SEQ ID NO: 360; and a second polypeptide chain comprises an amino acid sequence as set forth in SEQ ID NO: 456; or,
a first polypeptide chain comprises an amino acid sequence as set forth in SEQ ID NO: 360; and a second polypeptide chain comprises an amino acid sequence as set forth in SEQ ID NO: 457; or,
a first polypeptide chain comprises an amino acid sequence as set forth in SEQ ID NO: 360; and a second polypeptide chain comprises an amino acid sequence as set forth in SEQ ID NO: 458; or,
a first polypeptide chain comprises an amino acid sequence as set forth in SEQ ID NO: 360; and a second polypeptide chain comprises an amino acid sequence as set forth in SEQ ID NO: 459; or,
a first polypeptide chain comprises an amino acid sequence as set forth in SEQ ID NO: 419; and a second polypeptide chain comprises an amino acid sequence as set forth in SEQ ID NO: 412; or,
a first polypeptide chain comprises an amino acid sequence as set forth in SEQ ID NO: 419; and a second polypeptide chain comprises an amino acid sequence as set forth in SEQ ID NO: 414; or,
a first polypeptide chain comprises an amino acid sequence as set forth in SEQ ID NO: 440; and a second polypeptide chain comprises an amino acid sequence as set forth in SEQ ID NO: 428; or,
a first polypeptide chain comprises an amino acid sequence as set forth in SEQ ID NO: 441; and a second polypeptide chain comprises an amino acid sequence as set forth in SEQ ID NO: 428; or,
a first polypeptide chain comprises an amino acid sequence as set forth in SEQ ID NO: 442; and a second polypeptide chain comprises an amino acid sequence as set forth in SEQ ID NO: 428; or,
a first polypeptide chain comprises an amino acid sequence as set forth in SEQ ID NO: 443; and a second polypeptide chain comprises an amino acid sequence as set forth in SEQ ID NO: 428; or,
a first polypeptide chain comprises an amino acid sequence as set forth in SEQ ID NO: 487; and a second polypeptide chain comprises an amino acid sequence as set forth in SEQ ID NO: 520; or,
a first polypeptide chain comprises an amino acid sequence as set forth in SEQ ID NO: 353; and a second polypeptide chain comprises an amino acid sequence as set forth in SEQ ID NO: 521; or,
a first polypeptide chain comprises an amino acid sequence as set forth in SEQ ID NO: 371; and a second polypeptide chain comprises an amino acid sequence as set forth in SEQ ID NO: 522; or,
a first polypeptide chain comprises an amino acid sequence as set forth in SEQ ID NO: 360; and a second polypeptide chain comprises an amino acid sequence as set forth in SEQ ID NO: 523; or,
(2) comprising three polypeptide chains, wherein,
a first polypeptide chain comprises an amino acid sequence as set forth in SEQ ID NO: 357; a second polypeptide chain comprises an amino acid sequence as set forth in SEQ ID NO: 454; and a third polypeptide chain comprises an amino acid sequence as set forth in SEQ ID NO: 445; or,
a first polypeptide chain comprises an amino acid sequence as set forth in SEQ ID NO: 357; a second polypeptide chain comprises an amino acid sequence as set forth in SEQ ID NO: 454; and a third polypeptide chain comprises an amino acid sequence as set forth in SEQ ID NO: 446; or,
a first polypeptide chain comprises an amino acid sequence as set forth in SEQ ID NO: 357; a second polypeptide chain comprises an amino acid sequence as set forth in SEQ ID NO: 463; and a third polypeptide chain comprises an amino acid sequence as set forth in SEQ ID NO: 464; or,
a first polypeptide chain comprises an amino acid sequence as set forth in SEQ ID NO: 357; a second polypeptide chain comprises an amino acid sequence as set forth in SEQ ID NO: 411; and a third polypeptide chain comprises an amino acid sequence as set forth in SEQ ID NO: 414; or,
a first polypeptide chain comprises an amino acid sequence as set forth in SEQ ID NO: 415; a second polypeptide chain comprises an amino acid sequence as set forth in SEQ ID NO: 416; and a third polypeptide chain comprises an amino acid sequence as set forth in SEQ ID NO: 414; or,
a first polypeptide chain comprises an amino acid sequence as set forth in SEQ ID NO: 417; a second polypeptide chain comprises an amino acid sequence as set forth in SEQ ID NO: 418; and a third polypeptide chain comprises an amino acid sequence as set forth in SEQ ID NO: 414; or,
a first polypeptide chain comprises an amino acid sequence as set forth in SEQ ID NO: 357; a second polypeptide chain comprises an amino acid sequence as set forth in SEQ ID NO: 423; and a third polypeptide chain comprises an amino acid sequence as set forth in SEQ ID NO: 427; or,
a first polypeptide chain comprises an amino acid sequence as set forth in SEQ ID NO: 357; a second polypeptide chain comprises an amino acid sequence as set forth in SEQ ID NO: 423; and a third polypeptide chain comprises an amino acid sequence as set forth in SEQ ID NO: 428; or,
a first polypeptide chain comprises an amino acid sequence as set forth in SEQ ID NO: 357; a second polypeptide chain comprises an amino acid sequence as set forth in SEQ ID NO: 423; and a third polypeptide chain comprises an amino acid sequence as set forth in SEQ ID NO: 429; or,
a first polypeptide chain comprises an amino acid sequence as set forth in SEQ ID NO: 357; a second polypeptide chain comprises an amino acid sequence as set forth in SEQ ID NO: 444; and a third polypeptide chain comprises an amino acid sequence as set forth in SEQ ID NO: 449; or,
a first polypeptide chain comprises an amino acid sequence as set forth in SEQ ID NO: 357; a second polypeptide chain comprises an amino acid sequence as set forth in SEQ ID NO: 450; and a third polypeptide chain comprises an amino acid sequence as set forth in SEQ ID NO: 449; or,
a first polypeptide chain comprises an amino acid sequence as set forth in SEQ ID NO: 357; a second polypeptide chain comprises an amino acid sequence as set forth in SEQ ID NO: 444; and a third polypeptide chain comprises an amino acid sequence as set forth in SEQ ID NO: 445; or,
a first polypeptide chain comprises an amino acid sequence as set forth in SEQ ID NO: 357; a second polypeptide chain comprises an amino acid sequence as set forth in SEQ ID NO: 444; and a third polypeptide chain comprises an amino acid sequence as set forth in SEQ ID NO: 446; or,
a first polypeptide chain comprises an amino acid sequence as set forth in SEQ ID NO: 357; a second polypeptide chain comprises an amino acid sequence as set forth in SEQ ID NO: 450; and a third polypeptide chain comprises an amino acid sequence as set forth in SEQ ID NO: 445; or,
a first polypeptide chain comprises an amino acid sequence as set forth in SEQ ID NO: 357; a second polypeptide chain comprises an amino acid sequence as set forth in SEQ ID NO: 450; and a third polypeptide chain comprises an amino acid sequence as set forth in SEQ ID NO: 446; or,
a first polypeptide chain comprises an amino acid sequence as set forth in SEQ ID NO: 357; a second polypeptide chain comprises an amino acid sequence as set forth in SEQ ID NO: 444; and a third polypeptide chain comprises an amino acid sequence as set forth in SEQ ID NO: 447; or,
a first polypeptide chain comprises an amino acid sequence as set forth in SEQ ID NO: 357; a second polypeptide chain comprises an amino acid sequence as set forth in SEQ ID NO: 444; and a third polypeptide chain comprises an amino acid sequence as set forth in SEQ ID NO: 448; or,
a first polypeptide chain comprises an amino acid sequence as set forth in SEQ ID NO: 357; a second polypeptide chain comprises an amino acid sequence as set forth in SEQ ID NO: 450; and a third polypeptide chain comprises an amino acid sequence as set forth in SEQ ID NO: 447; or,
a first polypeptide chain comprises an amino acid sequence as set forth in SEQ ID NO: 357; a second polypeptide chain comprises an amino acid sequence as set forth in SEQ ID NO: 450; and a third polypeptide chain comprises an amino acid sequence as set forth in SEQ ID NO: 448; or,
a first polypeptide chain comprises an amino acid sequence as set forth in SEQ ID NO: 357; a second polypeptide chain comprises an amino acid sequence as set forth in SEQ ID NO: 454; and a third polypeptide chain comprises an amino acid sequence as set forth in SEQ ID NO: 465; or,
a first polypeptide chain comprises an amino acid sequence as set forth in SEQ ID NO: 357; a second polypeptide chain comprises an amino acid sequence as set forth in SEQ ID NO: 454; and a third polypeptide chain comprises an amino acid sequence as set forth in SEQ ID NO: 466; or,
a first polypeptide chain comprises an amino acid sequence as set forth in SEQ ID NO: 357; a second polypeptide chain comprises an amino acid sequence as set forth in SEQ ID NO: 454; and a third polypeptide chain comprises an amino acid sequence as set forth in SEQ ID NO: 467; or,
a first polypeptide chain comprises an amino acid sequence as set forth in SEQ ID NO: 357; a second polypeptide chain comprises an amino acid sequence as set forth in SEQ ID NO: 454; and a third polypeptide chain comprises an amino acid sequence as set forth in SEQ ID NO: 468; or,
a first polypeptide chain comprises an amino acid sequence as set forth in SEQ ID NO: 357; a second polypeptide chain comprises an amino acid sequence as set forth in SEQ ID NO: 454; and a third polypeptide chain comprises an amino acid sequence as set forth in SEQ ID NO: 469; or,
a first polypeptide chain comprises an amino acid sequence as set forth in SEQ ID NO: 357; a second polypeptide chain comprises an amino acid sequence as set forth in SEQ ID NO: 454; and a third polypeptide chain comprises an amino acid sequence as set forth in SEQ ID NO: 470; or,
a first polypeptide chain comprises an amino acid sequence as set forth in SEQ ID NO: 357; a second polypeptide chain comprises an amino acid sequence as set forth in SEQ ID NO: 454; and a third polypeptide chain comprises an amino acid sequence as set forth in SEQ ID NO: 471; or,
a first polypeptide chain comprises an amino acid sequence as set forth in SEQ ID NO: 357; a second polypeptide chain comprises an amino acid sequence as set forth in SEQ ID NO: 454; and a third polypeptide chain comprises an amino acid sequence as set forth in SEQ ID NO: 472; or,
a first polypeptide chain comprises an amino acid sequence as set forth in SEQ ID NO: 357; a second polypeptide chain comprises an amino acid sequence as set forth in SEQ ID NO: 454; and a third polypeptide chain comprises an amino acid sequence as set forth in SEQ ID NO: 473; or,
a first polypeptide chain comprises an amino acid sequence as set forth in SEQ ID NO: 357; a second polypeptide chain comprises an amino acid sequence as set forth in SEQ ID NO: 454; and a third polypeptide chain comprises an amino acid sequence as set forth in SEQ ID NO: 474; or,
a first polypeptide chain comprises an amino acid sequence as set forth in SEQ ID NO: 357; a second polypeptide chain comprises an amino acid sequence as set forth in SEQ ID NO: 454; and a third polypeptide chain comprises an amino acid sequence as set forth in SEQ ID NO: 475; or,
a first polypeptide chain comprises an amino acid sequence as set forth in SEQ ID NO: 357; a second polypeptide chain comprises an amino acid sequence as set forth in SEQ ID NO: 454; and a third polypeptide chain comprises an amino acid sequence as set forth in SEQ ID NO: 476; or,
a first polypeptide chain comprises an amino acid sequence as set forth in SEQ ID NO: 357; a second polypeptide chain comprises an amino acid sequence as set forth in SEQ ID NO: 454; and a third polypeptide chain comprises an amino acid sequence as set forth in SEQ ID NO: 477; or,
a first polypeptide chain comprises an amino acid sequence as set forth in SEQ ID NO: 357; a second polypeptide chain comprises an amino acid sequence as set forth in SEQ ID NO: 454; and a third polypeptide chain comprises an amino acid sequence as set forth in SEQ ID NO: 478; or,
a first polypeptide chain comprises an amino acid sequence as set forth in SEQ ID NO: 357; a second polypeptide chain comprises an amino acid sequence as set forth in SEQ ID NO: 454; and a third polypeptide chain comprises an amino acid sequence as set forth in SEQ ID NO: 479; or,
a first polypeptide chain comprises an amino acid sequence as set forth in SEQ ID NO: 357; a second polypeptide chain comprises an amino acid sequence as set forth in SEQ ID NO: 454; and a third polypeptide chain comprises an amino acid sequence as set forth in SEQ ID NO: 480; or,
a first polypeptide chain comprises an amino acid sequence as set forth in SEQ ID NO: 353; a second polypeptide chain comprises an amino acid sequence as set forth in SEQ ID NO: 407; and a third polypeptide chain comprises an amino acid sequence as set forth in SEQ ID NO: 390; or,
a first polypeptide chain comprises an amino acid sequence as set forth in SEQ ID NO: 353; a second polypeptide chain comprises an amino acid sequence as set forth in SEQ ID NO: 408; and a third polypeptide chain comprises an amino acid sequence as set forth in SEQ ID NO: 392; or,
a first polypeptide chain comprises an amino acid sequence as set forth in SEQ ID NO: 351; a second polypeptide chain comprises an amino acid sequence as set forth in SEQ ID NO: 391; and a third polypeptide chain comprises an amino acid sequence as set forth in SEQ ID NO: 390; or,
a first polypeptide chain comprises an amino acid sequence as set forth in SEQ ID NO: 351; a second polypeptide chain comprises an amino acid sequence as set forth in SEQ ID NO: 393; and a third polypeptide chain comprises an amino acid sequence as set forth in SEQ ID NO: 392; or,
a first polypeptide chain comprises an amino acid sequence as set forth in SEQ ID NO: 351; a second polypeptide chain comprises an amino acid sequence as set forth in SEQ ID NO: 391; and a third polypeptide chain comprises an amino acid sequence as set forth in SEQ ID NO: 434; or,
a first polypeptide chain comprises an amino acid sequence as set forth in SEQ ID NO: 351; a second polypeptide chain comprises an amino acid sequence as set forth in SEQ ID NO: 391; and a third polypeptide chain comprises an amino acid sequence as set forth in SEQ ID NO: 435; or,
a first polypeptide chain comprises an amino acid sequence as set forth in SEQ ID NO: 351; a second polypeptide chain comprises an amino acid sequence as set forth in SEQ ID NO: 393; and a third polypeptide chain comprises an amino acid sequence as set forth in SEQ ID NO: 436; or,
a first polypeptide chain comprises an amino acid sequence as set forth in SEQ ID NO: 351; a second polypeptide chain comprises an amino acid sequence as set forth in SEQ ID NO: 393; and a third polypeptide chain comprises an amino acid sequence as set forth in SEQ ID NO: 437; or,
a first polypeptide chain comprises an amino acid sequence as set forth in SEQ ID NO: 367; a second polypeptide chain comprises an amino acid sequence as set forth in SEQ ID NO: 438; and a third polypeptide chain comprises an amino acid sequence as set forth in SEQ ID NO: 434; or,
a first polypeptide chain comprises an amino acid sequence as set forth in SEQ ID NO: 367; a second polypeptide chain comprises an amino acid sequence as set forth in SEQ ID NO: 438; and a third polypeptide chain comprises an amino acid sequence as set forth in SEQ ID NO: 435; or,
a first polypeptide chain comprises an amino acid sequence as set forth in SEQ ID NO: 367; a second polypeptide chain comprises an amino acid sequence as set forth in SEQ ID NO: 439; and a third polypeptide chain comprises an amino acid sequence as set forth in SEQ ID NO: 436; or,
a first polypeptide chain comprises an amino acid sequence as set forth in SEQ ID NO: 367; a second polypeptide chain comprises an amino acid sequence as set forth in SEQ ID NO: 439; and a third polypeptide chain comprises an amino acid sequence as set forth in SEQ ID NO: 437; or,
a first polypeptide chain comprises an amino acid sequence as set forth in SEQ ID NO: 361; a second polypeptide chain comprises an amino acid sequence as set forth in SEQ ID NO: 481; and a third polypeptide chain comprises an amino acid sequence as set forth in SEQ ID NO: 482; or,
a first polypeptide chain comprises an amino acid sequence as set forth in SEQ ID NO: 361; a second polypeptide chain comprises an amino acid sequence as set forth in SEQ ID NO: 481; and a third polypeptide chain comprises an amino acid sequence as set forth in SEQ ID NO: 483; or,
a first polypeptide chain comprises an amino acid sequence as set forth in SEQ ID NO: 361; a second polypeptide chain comprises an amino acid sequence as set forth in SEQ ID NO: 481; and a third polypeptide chain comprises an amino acid sequence as set forth in SEQ ID NO: 484; or,
a first polypeptide chain comprises an amino acid sequence as set forth in SEQ ID NO: 361; a second polypeptide chain comprises an amino acid sequence as set forth in SEQ ID NO: 481; and a third polypeptide chain comprises an amino acid sequence as set forth in SEQ ID NO: 485; or,
a first polypeptide chain comprises an amino acid sequence as set forth in SEQ ID NO: 357; a second polypeptide chain comprises an amino acid sequence as set forth in SEQ ID NO: 411; and a third polypeptide chain comprises an amino acid sequence as set forth in SEQ ID NO: 412; or,
a first polypeptide chain comprises an amino acid sequence as set forth in SEQ ID NO: 415; a second polypeptide chain comprises an amino acid sequence as set forth in SEQ ID NO: 416; and a third polypeptide chain comprises an amino acid sequence as set forth in SEQ ID NO: 410; or,
a first polypeptide chain comprises an amino acid sequence as set forth in SEQ ID NO: 415; a second polypeptide chain comprises an amino acid sequence as set forth in SEQ ID NO: 416; and a third polypeptide chain comprises an amino acid sequence as set forth in SEQ ID NO: 412; or,
a first polypeptide chain comprises an amino acid sequence as set forth in SEQ ID NO: 417; a second polypeptide chain comprises an amino acid sequence as set forth in SEQ ID NO: 418; and a third polypeptide chain comprises an amino acid sequence as set forth in SEQ ID NO: 412; or,
a first polypeptide chain comprises an amino acid sequence as set forth in SEQ ID NO: 357; a second polypeptide chain comprises an amino acid sequence as set forth in SEQ ID NO: 423; and a third polypeptide chain comprises an amino acid sequence as set forth in SEQ ID NO: 426; or,
a first polypeptide chain comprises an amino acid sequence as set forth in SEQ ID NO: 357; a second polypeptide chain comprises an amino acid sequence as set forth in SEQ ID NO: 423; and a third polypeptide chain comprises an amino acid sequence as set forth in SEQ ID NO: 430.

28. The binding protein according to claim 20, wherein the binding protein further comprises a light chain constant region and/or the binding protein further comprises CH1, CH2 and/or CH3 of a heavy chain constant region.

29. An isolated nucleic acid encoding the binding protein according to claim 20.

30. An expression vector comprising the isolated nucleic acid according to claim 29.

31. A pharmaceutical composition comprising the binding protein according to claim 20.

32. A combination of kits comprising a kit I comprising the binding protein according to claim 20, and a kit II comprising an additional antibody or pharmaceutical composition for treating cancer.

33. A method for treating a cancer in a subject in need thereof, comprising administrating the binding protein according to claim 20 to the subject.

34. The method of claim 33, wherein the cancer is breast cancer, ovarian cancer, endometrial cancer, renal cancer, melanoma, lung cancer, gastric cancer, liver cancer, esophageal cancer, cervical cancer, head and neck tumor, cholangiocarcinoma, gallbladder cancer, bladder cancer, sarcoma, colorectal cancer, lymphoma or multiple myeloma.

35. A method for treating cancer in a subject in need thereof, comprising administering the combination of kits according to claim 32 to the subject.

36. A CD3 antibody, wherein the CD3 antibody comprises a light chain variable region and a heavy chain variable region;
the light chain variable region VL comprises LCDR1, LCDR2 and LCDR3 with amino acid sequences as set forth in SEQ ID NOs: 172, 192 and 216, respectively; the heavy chain variable region VH comprises HCDR1, HCDR2 and HCDR3 with amino acid sequences as set forth in SEQ ID NOs: 30, 68 and 128, respectively;
or, the light chain variable region VL comprises LCDR1, LCDR2 and LCDR3 with amino acid sequences as set forth in SEQ ID NOs: 177, 191 and 221, respectively; the heavy chain variable region VH comprises HCDR1, HCDR2 and HCDR3 with amino acid sequences as set forth in SEQ ID NOs: 15, 84 and 141, respectively;
or, the light chain variable region VL comprises LCDR1, LCDR2 and LCDR3 with amino acid sequences as set forth in SEQ ID NOs: 178, 197 and 222, respectively; the heavy chain variable region VH comprises HCDR1, HCDR2 and HCDR3 with amino acid sequences as set forth in SEQ ID NOs: 31, 85 and 142, respectively;
or, the light chain variable region VL comprises LCDR1, LCDR2 and LCDR3 with amino acid sequences as set forth in SEQ ID NOs: 177, 191 and 223, respectively; the heavy chain variable region VH comprises HCDR1, HCDR2 and HCDR3 with amino acid sequences as set forth in SEQ ID NOs: 31, 86 and 141, respectively;
or, the light chain variable region VL comprises LCDR1, LCDR2 and LCDR3 with amino acid sequences as set forth in SEQ ID NOs: 179, 198 and 224, respectively; the heavy chain variable region VH comprises HCDR1, HCDR2 and HCDR3 with amino acid sequences as set forth in SEQ ID NOs: 31, 85 and 142, respectively;
or, the light chain variable region VL comprises LCDR1, LCDR2 and LCDR3 with amino acid sequences as set forth in SEQ ID NOs: 172, 192 and 216, respectively; the heavy chain variable region VH comprises HCDR1, HCDR2 and HCDR3 with amino acid sequences as set forth in SEQ ID NOs: 20, 68 and 128, respectively;
or, the light chain variable region VL comprises the amino acid sequences as set forth in SEQ ID NOs: 291; the heavy chain variable region VH comprises the amino acid sequences as set forth in SEQ ID NOs: 263;
or, the light chain variable region VL comprises the amino acid sequences as set forth in SEQ ID NOs: 294; the heavy chain variable region VH comprises the amino acid sequences as set forth in SEQ ID NOs: 258;
or, the light chain variable region VL comprises the amino acid sequences as set forth in SEQ ID NOs: 295; the heavy chain variable region VH comprises the amino acid sequences as set forth in SEQ ID NOs: 259;
or, the light chain variable region VL comprises the amino acid sequences as set forth in SEQ ID NOs: 296; the heavy chain variable region VH comprises the amino acid sequences as set forth in SEQ ID NOs: 260;
or, the light chain variable region VL comprises the amino acid sequences as set forth in SEQ ID NOs: 297; the heavy chain variable region VH comprises the amino acid sequences as set forth in SEQ ID NOs: 259;
or, the light chain variable region VL comprises the amino acid sequences as set forth in SEQ ID NOs: 291; the heavy chain variable region VH comprises the amino acid sequences as set forth in SEQ ID NOs: 245;
or, the light chain variable region VL comprises the amino acid sequences as set forth in SEQ ID NOs: 291; the heavy chain variable region VH comprises the amino acid sequences as set forth in SEQ ID NOs: 257;
or, the light chain variable region VL comprises the amino acid sequences as set forth in SEQ ID NOs: 291; the heavy chain variable region VH comprises the amino acid sequences as set forth in SEQ ID NOs: 281;
or, the light chain variable region VL comprises the amino acid sequences as set forth in SEQ ID NOs: 291; the heavy chain variable region VH comprises the amino acid sequences as set forth in SEQ ID NOs: 244;
or, the CD3 antibody comprises two polypeptide chains, wherein, a first polypeptide chain comprises an amino acid sequence as set forth in SEQ ID NO: 357; and a second polypeptide chain comprises an amino acid sequence as set forth in SEQ ID NO: 313;
or, a first polypeptide chain comprises an amino acid sequence as set forth in SEQ ID NO: 357; and a second polypeptide chain comprises an amino acid sequence as set forth in SEQ ID NO: 325;
or, a first polypeptide chain comprises an amino acid sequence as set forth in SEQ ID NO: 357; and a second polypeptide chain comprises an amino acid sequence as set forth in SEQ ID NO: 328;
or, a first polypeptide chain comprises an amino acid sequence as set forth in SEQ ID NO: 357; and a second polypeptide chain comprises an amino acid sequence as set forth in SEQ ID NO: 346;
or, the CD3 antibody comprises one polypeptide chain, wherein, the polypeptide chain comprises an amino acid sequence as set forth in SEQ ID NO: 489, an amino acid sequence as set forth in SEQ ID NO: 490, an amino acid sequence as set forth in SEQ ID NO: 491, an amino acid sequence as set forth in SEQ ID NO: 492, or, an amino acid sequence as set forth in SEQ ID NO: 493.

37. A BCMA antibody, wherein the BCMA antibody comprises a heavy chain variable region; the heavy chain variable region VH comprises HCDR1, HCDR2 and HCDR3 with amino acid sequences as set forth in SEQ ID NOs: 26, 78 and 136, respectively; the heavy chain variable region VH comprises HCDR1, HCDR2 and HCDR3 with amino acid sequences as set forth in SEQ ID NOs: 15, 75 and 133, respectively; or, the heavy chain variable region VH comprises HCDR1, HCDR2 and HCDR3 with amino acid sequences as set forth in SEQ ID NOs: 24, 76 and 134, respectively; or, the heavy chain variable region VH comprises HCDR1, HCDR2 and HCDR3 with amino acid sequences as set forth in SEQ ID NOs: 25, 77 and 135, respectively;
or, the BCMA antibody comprises a heavy chain variable region; the heavy chain variable region VH comprises HCDR1, HCDR2 and HCDR3 with amino acid sequences as set forth in SEQ ID NOs: 26, 90 and 136, respectively; or, the heavy chain variable region VH comprises HCDR1, HCDR2 and HCDR3 with amino acid sequences as set forth in SEQ ID NOs: 34, 78 and 146, respectively; or, the heavy chain variable region VH comprises HCDR1, HCDR2 and HCDR3 with amino acid sequences as set forth in SEQ ID NOs: 35, 78 and 147, respectively; or, the heavy chain variable region VH comprises HCDR1, HCDR2 and HCDR3 with amino acid sequences as set forth in SEQ ID NOs: 35, 90 and 147, respectively; or, the heavy chain variable region VH comprises HCDR1, HCDR2 and HCDR3 with amino acid sequences as set forth in SEQ ID NOs: 36, 90 and 146, respectively; or, the heavy chain variable region VH comprises HCDR1, HCDR2 and HCDR3 with amino acid sequences as set forth in SEQ ID NOs: 35, 76 and 147, respectively; or, the heavy chain variable region VH comprises HCDR1, HCDR2 and HCDR3 with amino acid sequences as set forth in SEQ ID NOs: 34, 78 and 148, respectively; or, the heavy chain variable region VH comprises HCDR1, HCDR2 and HCDR3 with amino acid sequences as set forth in SEQ ID NOs: 35, 76 and 136, respectively; or, the heavy chain variable region VH comprises HCDR1, HCDR2 and HCDR3 with amino acid sequences as set forth in SEQ ID NOs: 35, 90 and 146, respectively; or, the heavy chain variable region VH comprises HCDR1, HCDR2 and HCDR3 with amino acid sequences as set forth in SEQ ID NOs: 34, 76 and 136, respectively; or, the heavy chain variable region VH comprises HCDR1, HCDR2 and HCDR3 with amino acid sequences as set forth in SEQ ID NOs: 35, 76 and 146, respectively; or, the heavy chain variable region VH comprises HCDR1, HCDR2 and HCDR3 with amino acid sequences as set forth in SEQ ID NOs: 34, 76 and 146, respectively; or, the heavy chain variable region VH comprises HCDR1, HCDR2 and HCDR3 with amino acid sequences as set forth in SEQ ID NOs: 35, 90 and 148, respectively; or, the heavy chain variable region VH comprises HCDR1, HCDR2 and HCDR3 with amino acid sequences as set forth in SEQ ID NOs: 35, 90 and 136, respectively;
or, the heavy chain variable region VH comprises the amino acid sequences as set forth in SEQ ID NOs: 251; or the heavy chain variable region VH comprises the amino acid sequences as set forth in SEQ ID NOs: 248; or the heavy chain variable region VH comprises the amino acid sequences as set forth in SEQ ID NOs: 249; or, the heavy chain variable region VH comprises the amino acid sequences as set forth in SEQ ID NOs: 250;
or, the heavy chain variable region VH comprises the amino acid sequences as set forth in SEQ ID NOs: 265; or, the heavy chain variable region VH comprises the amino acid sequences as set forth in SEQ ID NOs: 266; or, the heavy chain variable region VH comprises the amino acid sequences as set forth in SEQ ID NOs: 267; or, the heavy chain variable region VH comprises the amino acid sequences as set forth in SEQ ID NOs: 268; or, the heavy chain variable region VH comprises the amino acid sequences as set forth in SEQ ID NOs: 269; or, the heavy chain variable region VH comprises the amino acid sequences as set forth in SEQ ID NOs: 270; or, the heavy chain variable region VH comprises the amino acid sequences as set forth in SEQ ID NOs: 271; or, the heavy chain variable region VH comprises the amino acid sequences as set forth in SEQ ID NOs: 272; or, the heavy chain variable region VH comprises the amino acid sequences as set forth in SEQ ID NOs: 273; or, the heavy chain variable region VH comprises the amino acid sequences as set forth in SEQ ID NOs: 274; or, the heavy chain variable region VH comprises the amino acid sequences as set forth in SEQ ID NOs: 275; or, the heavy chain variable region VH comprises the amino acid sequences as set forth in SEQ ID NOs: 276; or, the heavy chain variable region VH comprises the amino acid sequences as set forth in SEQ ID NOs: 277; or, the heavy chain variable region VH comprises the amino acid sequences as set forth in SEQ ID NOs: 278; or, the heavy chain variable region VH comprises the amino acid sequences as set forth in SEQ ID NOs: 279; or, the heavy chain variable region VH comprises the amino acid sequences as set forth in SEQ ID NOs: 280;
or, the BCMA antibody comprises one polypeptide chain, wherein, the polypeptide chain comprises an amino acid sequence as set forth in SEQ ID NO: 319, an amino acid sequence as set forth in SEQ ID NO: 316, an amino acid sequence as set forth in SEQ ID NO: 317, or an amino acid sequence as set forth in SEQ ID NO: 318;
or, the BCMA antibody comprises one polypeptide chain, wherein, the polypeptide chain comprises an amino acid sequence as set forth in SEQ ID NO: 330, or, an amino acid sequence as set forth in SEQ ID NO: 331, or, an amino acid sequence as set forth in SEQ ID NO: 332, or, an amino acid sequence as set forth in SEQ ID NO: 333, or, an amino acid sequence as set forth in SEQ ID NO: 334, or, an amino acid sequence as set forth in SEQ ID NO: 335, or, an amino acid sequence as set forth in SEQ ID NO: 336, or, an amino acid sequence as set forth in SEQ ID NO: 337, or, an amino acid sequence as set forth in SEQ ID NO: 338, or, an amino acid sequence as set forth in SEQ ID NO: 339, or, an amino acid sequence as set forth in SEQ ID NO: 340, or, an amino acid sequence as set forth in SEQ ID NO: 341, or, an amino acid sequence as set forth in SEQ ID NO: 342, or, an amino acid sequence as set forth in SEQ ID NO: 343, or, an amino acid sequence as set forth in SEQ ID NO: 344, or, an amino acid sequence as set forth in SEQ ID NO: 345.
